(19) United States
(12) Patent Application Publication
(10) Pub. No.: US 2011/0119785 A1
(43) Pub. Date: May 19, 2011

(54) NUCLEOTIDE SEQUENCES AND CORRESPONDING POLYPEPTIDES CONFERRING MODULATED GROWTH RATE AND BIOMASS IN PLANTS GROWN IN SALINE AND OXIDATIVE CONDITIONS

(75) Inventors: Fasong Zhou, Fremont, CA (US); Kerstin Piccolo, Woodland Hills, CA (US); Julissa Sosa, Northridge, CA (US)

(73) Assignee: CERES, INC., Thousand Oaks, CA (US)

(21) Appl. No.: 12/922,143

(22) PCT Filed: Mar. 12, 2009
(86) PCT No.: PCT/US09/37025

§ 371 Date: Feb. 1, 2011

Related U.S. Application Data
(60) Provisional application No. 61/036,396, filed on Mar. 13, 2008.

(51) Int. Cl. A01H 1/02; C12N 5/10; A01H 1/00; A01H 5/00; A01H 5/04; C07H 21/04; C12Q 1/68

(52) U.S. Cl. 800/275; 435/419; 800/278; 800/295; 800/298; 800/320; 800/320.1; 800/320.3; 800/312; 800/314; 800/320.2; 800/322; 536/23.6; 435/6; 800/260

(57) ABSTRACT

The present invention relates to isolated nucleic acid molecules and their corresponding encoded polypeptides able confer the trait of improved plant size, vegetative growth, growth rate, seedling vigor and/or biomass in plants challenged with saline and/or oxidative stress conditions. The present invention further relates to the use of these nucleic acid molecules and polypeptides in making transgenic plants, plant cells, plant materials or seeds of a plant having plant size, vegetative growth, growth rate, seedling vigor and/or biomass that are improved in saline and/or oxidative stress conditions with respect to wild-type plants grown under similar conditions.

### CROSS-REFERENCE TO RELATED APPLICATIONS

[0001] The present application claims priority to prior U.S. provisional application Ser. No. 61/036,396, filed on Mar. 13, 2008, the entire contents of which are hereby incorporated by reference.

### INCORPORATION-BY-REFERENCE OF SEQUENCE LISTING OR TABLE

[0002] The material in the accompanying sequence listing is hereby incorporated by reference into this application in its entirety. The accompanying file, named 2009_{—}03_{—}05_{—}2750_{—}1711PWO1_SequenceListingMSDOS_Format.txt was created on Mar. 3, 2009 and is 3,357 KB. The file can be accessed using Microsoft Word on a computer that uses Windows OS.

### TECHNICAL FIELD

[0003] The present invention relates to isolated nucleic acid molecules and their corresponding encoded polypeptides able to enhance plant growth under saline and/or oxidative stress conditions. The present invention further relates to using the nucleic acid molecules and polypeptides to make transgenic plants, plant cells, plant materials or seeds of a plant having improved growth rate, vegetative growth, seedling vigor and/or biomass under saline and/or oxidative stress conditions as compared to wild-type plants grown under similar conditions.

### BACKGROUND

[0004] Plants specifically improved for agriculture, horticulture, biomass conversion, and other industries (e.g. biofuel, paper industry, plants as production factories for proteins or other compounds) can be obtained using molecular technologies. As an example, great agronomic value can result from enhancing plant growth in and/or tolerance to saline and/or oxidative stress conditions.

### Salinity

[0005] A wide variety of agriculturally important plant species demonstrate significant sensitivity to saline stress conditions. Upon salt concentration exceeding a relatively low threshold, many plants suffer from stunted growth, necrosis, and death that results in an overall stunted appearance and reduced yields of plant material, seeds, fruit and other valuable products. Physiologically, plants challenged with salinity experience disruption in ion and water homeostasis, inhibition of metabolism, and damage to cellular membranes that result in developmental arrest and cell death (Huh et al. (2002) Plant J, 29(5):649-59).

[0006] In many of the world's most productive agricultural regions, agricultural activities themselves lead to increased water and soil salinity, which threatens their sustained productivity. One example is crop irrigation in arid regions that have abundant sunlight. After irrigation water is applied to cropland, it is removed by the processes of evaporation and transpiration. While these processes remove water from the soil, they leave behind dissolved salts carried in irrigation water. Consequently, soil and groundwater salt concentrations build over time, rendering the land and shallow groundwater saline and thus damaging to crops.

[0007] In addition to human activities, natural geological processes have created vast tracts of saline land that would be highly productive if not saline. In total, approximately 20% of the irrigated lands are negatively affected by salinity (Yamaguchi and Blumwald, 2005, Trends in Plant Science, 10: 615-620). For these and other reasons, it is of great interest and importance to identify genes that confer improved salt tolerance characteristics to thereby enable one to create transgenic plants (such as crop plants) with enhanced growth and/or productivity characteristics in saline conditions.

[0008] Despite this progress, today there continues to be a great need for generally applicable processes that improve forest or agricultural plant growth to suit particular needs depending on specific environmental conditions. To this end, the present invention is directed to advantageously manipulating plant tolerance to salinity in order to maximize the benefits of various crops depending on the benefit sought, and is characterized by expression of recombinant DNA molecules in plants. These molecules may be from the plant itself, and simply expressed at a higher or lower level, or the molecules may be from different species.

### Oxidative Stress

[0009] Plants lead a sessile lifestyle and so are generally destined to reside where their seed germinates. Consequently, they can be exposed to unfavorable environmental conditions arising from weather, pollution and location. Stress conditions, such as extremes in temperature, drought and desiccation, salinity, soil nutrient content, heavy metals, UV radiation, pollutants such as ozone and SO₂, mechanical stress, high light and pathogen attack, have a large impact on plant growth and development. These types of stress exposure induce formation of toxic oxygen species, which are generated in all aerobic cells and are associated with oxidative damage at the cellular level. Several published reports have characterized toxic oxygen species generation and the subsequent oxidative damage caused by abiotic stresses (see Larkindale and Knight (2002); Borsani et al. (2001); Lee et al (2004); Aroca et al (2005); Luna et al (2005); and Noctor et al (2002)).

[0010] The toxic oxygen species are referred to as reactive oxygen species (ROS), reactive oxygen intermediates (ROI) or activated oxygen species (AOS) and are partially reduced or activated derivatives of oxygen. ROS/ROI/AOS include the oxygen-centered superoxide (O₂) and hydroxyl (.OH) free radicals as well as hydrogen peroxide (H₂O₂), nitric oxide (NO) and O₂. These oxygen species are generated as byproducts from reactions that occur during photosynthesis, respiration and photorespiration, and are predominantly formed in the chloroplasts, mitochondria, endoplasmic reticulum, microbodies (e.g. peroxisomes and glyoxysomes), plasma membranes and cell walls. While the toxicity of O₂⁻ and H₂O₂ themselves is relatively low, their metal-dependent conversion to highly toxic .OH is thought to be responsible for the majority of the biological damage associated with these molecules.

[0011] Oxidative stress damages cell structure and affects cell metabolism and catabolism. Membrane lipids are subject to oxidation by ROS/ROI/AOS, resulting in accumulation of high molecular weight, cross-linked fatty acids and phospholipids. Oxidative attack on proteins results in site-specific amino acid modifications, fragmentation of the peptide chain, aggregation of cross-linked reaction products, altered electrical charge and increased susceptibility to proteolysis, all of which frequently leads to elimination of enzyme activity. ROS/ROI/AOS that generate oxygen free radicals, such as ionizing radiation, also induce numerous lesions in DNA at both the sugar and base moieties which cause deletions, mutation and other lethal genetic effects such as base degradation, single strand breakage and cross-linking to proteins. Morphologically, the adverse effects of high levels of ROS accumulation are manifested as stunted growth and necrotic lesions.

[0012] Although capable of producing damage, ROS/ROI/AOS are also key regulators of metabolic and defense pathways, playing roles as signaling or secondary messenger molecules. For example, pathogen-induced ROS/ROI/AOS production is critical in disease resistance where these molecules are involved at three different levels: penetration resistance, hypersensitive response (HR) and systemic acquired resistance (Levine et al. (1994); Lamb and Dixon (1997); Zhou et al. (2000); Aviv et al. (2002)). In penetration resistance, ROS/ROI/AOS function by reinforcing cell walls through polyphenolic cross-linking. With respect to hypersensitive response, H₂O₂ is an active signaling molecule whose effect is dose dependent. At high dosages, H₂O₂ triggers hypersensitive cell death and thus restricts the pathogen to local infection sites (Lamb and Dixon (1997)) while low dosages block cell cycle progression (Reichheld et al. (1999)) and signal secondary wall differentiation (Potikha et al. (1999)). Lastly, ROS/ROI/AOS molecules play a role in broad-spectrum systemic acquired disease resistance by triggering micro-HR systematically after the first pathogen inoculation.

[0013] In the signal cascades leading to oxidative stress, salicylic acid (SA) has been identified as an important signaling molecule to mediate ROS/ROI/AOS accumulation in various stress conditions, such as salt and osmotic stress (Borsani et al. (2001)), drought (Senaratna et al. (2000)), heat (Dat et al. (1998)), cold (Scott et al. (2004)), UV-light (Surplus et al. (1998)), paraquat (Kim et al. (2003)) and disease resistance against different pathogens (Zhou et al. (2004)). High levels of SA induce H₂O₂ production as well as cell death.

[0014] Several signaling components required for SA-mediated ROS/ROI/AOS accumulation and gene expression have been characterized. For example, NPR1 is required for SA-induced PR gene expression and disease resistance (Cao et al. (1994)). The mutations in eds1 and eds5 block SA-mediated signaling and enhance disease susceptibility (Rusterucci et al. (2001)). Over-expression of NahG in various plant species also suppresses SA-induced responses to both abiotic and biotic stresses (Delaney et al. (1994)). Recently, Scott and colleagues (2004) reported that chilling treatment induced accumulation of SA in Arabidopsis and the degradation of SA by overexpression of NahG enhanced cold tolerance in a transgenic plant.

[0015] SA, as a phytohormone, also promotes early flowering (Martinez et al. (2004)). SA at various levels may play different roles in plant growth and stress responses. However, most of the time, the increased tolerance to high levels of SA appears to be beneficial, since it reduces the side effects of SA accumulation while stimulating SA-mediated stress responses.

[0016] Similarly, NO is capable of generating ROS/ROI/AOS and is a plant signaling molecule involved in the regulation of seed germination, stomatal closure (Mata and Lamattina (2001); Desikan et al. (2002)), flowering time (He et al. (2004)), antioxidant reactions to suppress cell death (Beligni et al. (2002)) and tolerance to biotic and abiotic stress conditions (Mata and Lamattina (2001)). While the effects of NO can be mimicked through the application of sodium nitroprusside (SNP), endogenous NO production in plants results from the activity of a nitric oxide synthase that uses L-arginine (Guo et al. (2003)) as well as nitrate reductase-mediated reactions (Desikan et al (2002)). NO can react with redox centers in proteins and membranes, thereby causing cell damage and inducing cell death.

[0017] In order to control the two-fold nature of ROS/ROI/AOS molecules, plants have developed a sophisticated regulatory system which involves both production and scavenging of ROS/ROI/AOS in cells. During normal growth and development, this pathway monitors the level of ROS/ROI/AOS produced by metabolism and controls the expression and activity of ROS/ROI/AOS scavenging pathways. The major ROS/ROI/AOS scavenging mechanisms include the action of the superoxide dismutase (SOD), ascorbate perioxidase (APX) and catalase (CAT) enzymes as well as nonenzymatic components such as ascorbic acid, α-tocopherol and glutathione.

[0018] The antioxidant enzymes are believed to be critical components in preventing oxidative stress, in part because pretreatment of plants with one form of stress, and which induces expression of these enzymes, can increase tolerance for a different stress (cross-tolerance) Allen (1995)). In addition, plant lines selected for resistance to herbicides that function by inducing ROS/R01/AOS generally have increased levels of one or more of these antioxidant enzymes and also exhibit cross-tolerance (Gressel and Galun (1994)).

[0019] Plant development and yield depend on the ability of the plant to manage oxidative stress, whether it is via the signaling or the scavenging pathways. Consequently, improvements in a plant's ability to withstand oxidative stress, or to obtain a higher degree of cross-tolerance once oxidative stress has been experienced, has significant value in agriculture. The sequences and methods of the invention provide the means by which tolerance to oxidative stress can be improved, either via the signaling or the scavenging pathways.

### Plant Improvement

[0020] The availability and sustainability of a stream of food and feed for people and domesticated animals has been a high priority throughout the history of human civilization and lies at the origin of agriculture. Specialists and researchers in the fields of agronomy science, agriculture, crop science, horticulture, and forest science are even today constantly striving to find and produce plants with an increased growth potential to feed an increasing world population and to guarantee a supply of reproducible raw materials. The robust level of research in these fields of science indicates the level of importance leaders in every geographic environment and climate around the world place on providing sustainable sources of food, feed and energy.

[0021] Manipulation of crop performance has been accomplished conventionally for centuries through selection and plant breeding. The breeding process is, however, both time-consuming and labor-intensive. Furthermore, appropriate breeding programs must be specially designed for each relevant plant species.

[0022] On the other hand, great progress has been made in using molecular genetic approaches to manipulate plants to provide better crops. Through the introduction and expression of recombinant nucleic acid molecules in plants, researchers are now poised to provide the community with plant species tailored to grow more efficiently and yield more product despite suboptimal geographic and/or climatic environments. These new approaches have the additional advantage of not being limited to one plant species, but instead being applicable to multiple different plant species (Zhang et al. (2004) Plant Physiol. 135:615; Zhang et al. (2001) Proc. Natl. Acad. Sci. USA 98:12832).

### SUMMARY

[0023] This document provides methods and materials related to plants having modulated levels of tolerance to salinity and/or oxidative stress. For example, this document provides transgenic plants and plant cells having increased levels of tolerance to salinity and/or oxidative stress, nucleic acids used to generate transgenic plants and plant cells having increased levels of tolerance to salinity and/or oxidative stress, and methods for making plants and plant cells having increased levels of tolerance to salinity and/or oxidative stress. Such plants and plant cells provide the opportunity to produce crops or plants under saline and/or oxidative stress conditions without stunted growth and diminished yields. Increased levels of tolerance to salinity and/or oxidative stress may be useful to produce biomass which may be converted to a liquid fuel or other chemicals and/or to produce food and feed on land that is currently marginally productive, resulting in an overall expansion of arable land.

[0024] Methods of producing a plant and/or plant tissue are provided herein. In one aspect, a method of producing a plant and/or plant tissue having increased tolerance to salinity and/or increased tolerance to oxidative stress comprises growing a plant cell comprising an exogenous nucleic acid. The exogenous nucleic acid comprises a regulatory region operably linked to a nucleotide sequence encoding a polypeptide. The amino acid sequence of the encoded polypeptide has a Hidden Markov Model (HMM) bit score greater than about 15 using an HMM generated from the amino acid sequences depicted in one of FIGS. 1 to 16. The plant and/or plant tissue has a difference in the level of tolerance to salinity and/or oxidative stress as compared to the corresponding level in tolerance to salinity and/or oxidative stress of a control plant that does not comprise the exogenous nucleic acid. In some embodiments the amino acid sequence of the polypeptide has an HMM bit score greater than about 170 using an HMM generated from the amino acid sequences depicted in FIG. 1. In some embodiments the amino acid sequence of the polypeptide has an HMM bit score greater than about 255 using an HMM generated from the amino acid sequences depicted in FIG. 2. In some embodiments the amino acid sequence of the polypeptide has an HMM bit score greater than about 65 using an HMM generated from the amino acid sequences depicted in FIG. 3. In some embodiments the amino acid sequence of the polypeptide has an HMM bit score greater than about 175 using an HMM generated from the amino acid sequences depicted in FIG. 4. In some embodiments the amino acid sequence of the polypeptide has an HMM bit score greater than about 1095 using an HMM generated from the amino acid sequences depicted in FIG. 5. In some embodiments the amino acid sequence of the polypeptide has an HMM bit score greater than about 535 using an HMM generated from the amino acid sequences depicted in FIG. 6. In some embodiments the amino acid sequence of the polypeptide has an HMM bit score greater than about 120 using an HMM generated from the amino acid sequences depicted in FIG. 7. In some embodiments the amino acid sequence of the polypeptide has an HMM bit score greater than about 455 using an HMM generated from the amino acid sequences depicted in FIG. 8. In some embodiments the amino acid sequence of the polypeptide has an HMM bit score greater than about 180 using an HMM generated from the amino acid sequences depicted in FIG. 9. In some embodiments the amino acid sequence of the polypeptide has an HMM bit score greater than about 110 using an HMM generated from the amino acid sequences depicted in FIG. 10. In some embodiments the amino acid sequence of the polypeptide has an HMM bit score greater than about 75 using an HMM generated from the amino acid sequences depicted in FIG. 11. In some embodiments the amino acid sequence of the polypeptide has an HMM bit score greater than about 15 using an HMM generated from the amino acid sequences depicted in FIG. 12. In some embodiments the amino acid sequence of the polypeptide has an HMM bit score greater than about 70 using an HMM generated from the amino acid sequences depicted in FIG. 13. In some embodiments the amino acid sequence of the polypeptide has an HMM bit score greater than about 50 using an HMM generated from the amino acid sequences depicted in FIG. 14. In some embodiments the amino acid sequence of the polypeptide has an HMM bit score greater than about 300 using an HMM generated from the amino acid sequences depicted in FIG. 15. In some embodiments the amino acid sequence of the polypeptide has an HMM bit score greater than about 25 using an HMM generated from the amino acid sequences depicted in FIG. 16.

[0025] In another aspect, a method comprises growing a plant cell comprising an exogenous nucleic acid. The exogenous nucleic acid comprises a regulatory region operably linked to a nucleotide sequence encoding a polypeptide having at least 80%, 85%, 90%, 95%, 97%, 98% or greater sequence identity to an amino acid sequence set forth in SEQ ID NOs: 2, 11, 102, 32, 138, 149, 441, 172, 764, 389, 316, 200, 697, 239, 892, 922, 693 or any of the amino acid sequences set forth in the sequence listing. A plant produced from the plant cell has a difference in the level of tolerance to salinity and/or oxidative stress as compared to the corresponding level in a control plant that does not comprise the exogenous nucleic acid.

[0026] In another aspect, a method comprises growing a plant cell comprising an exogenous nucleic acid. The exogenous nucleic acid comprises a regulatory region operably linked to a nucleotide sequence having at least 80%, 85%, 90%, 95%, 97%, 98% or greater sequence identity to at least a fragment of a nucleotide sequence set forth in SEQ ID NOs. 1, 10, 101, 31, 137, 148, 440, 171, 763, 388, 315, 199, 696, 238, 891, 921, 692 or a nucleotide sequence encoding any of the amino acid sequences set forth in the sequence listing. A plant and/or plant tissue produced from the plant cell has a difference in the level of salinity and/or oxidative stress tolerance as compared to the corresponding level in a control plant that does not comprise the exogenous nucleic acid.

[0027] Methods of modulating the level of salt tolerance and/or oxidative stress tolerance in a plant are provided herein. In one aspect, a method comprises introducing into a plant cell an exogenous nucleic acid, that comprises a regulatory region operably linked to a nucleotide sequence encoding a polypeptide. The HMM bit score of the amino acid sequence of the polypeptide is greater than 170, 255, 65, 175, 1095, 535, 120, 455, 180, 110, 75, 15, 70, 50, 300, or 25, using an HMM generated from the amino acid sequences depicted in one of FIGS. 1-16, respectively. A plant and/or plant tissue produced from the plant cell has a difference in the level of tolerance to salinity and/or oxidative stress as compared to the corresponding level in a control plant that does not comprise the exogenous nucleic acid.

[0028] In another aspect, a method comprises introducing into a plant cell an exogenous nucleic acid that comprises a regulatory region operably linked to a nucleotide sequence encoding a polypeptide having at least 80%, 85%, 90%, 95%, 97%, 98% or greater sequence identity to an amino acid sequence set forth in SEQ ID NOs: 2, 11, 102, 32, 138, 149, 441, 172, 764, 389, 316, 200, 697, 239, 892, 922, 693 or any of the amino acid sequences set forth in the sequence listing. A plant and/or plant tissue produced from the plant cell has a difference in the level of tolerance to salinity or oxidative stress as compared to the corresponding level in a control plant that does not comprise the exogenous nucleic acid.

[0029] In some embodiments, the methods comprise introducing into the plant cell an exogenous nucleic acid encoding polypeptides selected from the group consisting of SEQ ID NOs: 2, 11, 102, 32, 138, 149, 441, 172, 764, 389, 316, 200, 697, 239, 892, 922, 693 and any of the amino acid sequences set forth in the sequence listing. A plant and/or plant tissue produced from the plant cell has a difference in the level of tolerance to salinity as compared to the corresponding level in a control plant that does not comprise the exogenous nucleic acid. In some embodiments, the methods comprise introducing into the plant cell an exogenous nucleic acid encoding polypeptides selected from the group consisting of SEQ ID NO: 2, 11, 102, 32, 138, 149, 441, 172, 764, 389, 316, 200, 697, 239, 892, 922, 693 and any of the amino acid sequences set forth in the sequence listing, and a plant and/or plant tissue produced from the plant cell has a difference in the level of tolerance to oxidative stress as compared to the corresponding level in a control plant that does not comprise the exogenous nucleic acid.

[0030] In another aspect, a method comprises introducing into a plant cell an exogenous nucleic acid, that comprises a regulatory region operably linked to a nucleotide sequence having at least 80%, 85%, 90%, 95%, 97%, 98% or greater sequence identity to a nucleotide sequence, or a fragment thereof, set forth in SEQ ID NOs: 1, 10, 101, 31, 137, 148, 440, 171, 763, 388, 315, 199, 696, 238, 891, 921, 692, or to a nucleotide sequence encoding any of the amino acid sequences set forth in the sequence listing, or a fragment thereof. A plant and/or plant tissue produced from the plant cell has a difference in the level of tolerance to salinity or oxidative stress as compared to the corresponding level in a control plant that does not comprise the exogenous nucleic acid.

[0031] Plant cells comprising an exogenous nucleic acid are provided herein. In one aspect, the exogenous nucleic acid comprises a regulatory region operably linked to a nucleotide sequence encoding a polypeptide. The HMM bit score of the amino acid sequence of the polypeptide is greater than 170, 255, 65, 175, 1095, 535, 120, 455, 180, 110, 75, 15, 70, 50, 300, or 25, using an HMM based on the amino acid sequences depicted in one of FIGS. 1-16. The plant and/or plant tissue has a difference in the level of tolerance to salinity or oxidative stress as compared to the corresponding level in a control plant that does not comprise the exogenous nucleic acid. In another aspect, the exogenous nucleic acid comprises a regulatory region operably linked to a nucleotide sequence encoding a polypeptide having at least 80%, 85%, 90%, 95%, 97%, 98% or greater sequence identity to an amino acid sequence selected from the group consisting of SEQ ID NOs: 2, 11, 102, 32, 138, 149, 441, 172, 764, 389, 316, 200, 697, 239, 892, 922, 693, and any of the amino acid sequences set forth in the sequence listing. A plant and/or plant tissue produced from the plant cell has a difference in the level of tolerance to salinity or oxidative stress as compared to the corresponding level in a control plant that does not comprise the exogenous nucleic acid. In another aspect, the exogenous nucleic acid comprises a regulatory region operably linked to a nucleotide sequence having 80 percent or greater sequence identity to at least a fragment of a nucleotide sequence selected from the group consisting of SEQ ID Nos. 1, 10, 101, 31, 137, 148, 440, 171, 763, 388, 315, 199, 696, 238, 891, 921, 692, and to a nucleotide sequence encoding any of the amino acid sequences set forth in the sequence listing. A plant and/or plant tissue produced from the plant cell has a difference in the level of tolerance to salinity or oxidative stress as compared to the corresponding level in a control plant that does not comprise the exogenous nucleic acid. A transgenic plant comprising such a plant cell is also provided. In some embodiments, the transgenic plant is a member of a species selected from the group consisting of Panicum virgatum (switchgrass), Sorghum bicolor (sorghum, sudangrass), Miscanthus giganteus (miscanthus), Saccharum sp. (energycane), Populus balsamifera (poplar), Zea mays (corn), Glycine max (soybean), Brassica napus (canola), Triticum aestivum (wheat), Gossypium hirsutum (cotton), Oryza sativa (rice), Helianthus annuus (sunflower), Medicago sativa (alfalfa), Beta vulgaris (sugarbeet), or Pennisetum glaucum (pearl millet). Some embodiments are related to products comprising seed or vegetative tissue from transgenic plants as described above. Some seed products comprise embryonic tissue from transgenic plants as described above. Some embodiments relate to food or feed products from transgenic plants as described above.

[0032] In another aspect, an isolated nucleic acid comprises a nucleotide sequence encoding a polypeptide having at least 80%, 85%, 90%, 95%, 97%, 98% or greater sequence identity to the amino acid sequence set forth in SEQ ID Nos. 2, 11, 102, 32, 138, 149, 441, 172, 764, 389, 316, 200, 697, 239, 892, 922, 693, or any of the amino acid sequences set forth in the sequence listing.

[0033] In another aspect, an isolated nucleic acid comprises an isolated nucleic acid comprising a nucleotide sequence having at least 80%, 85%, 90%, 95%, 97%, 98% or greater sequence identity to the nucleotide sequence set forth in SEQ ID NO: 10, 12, 14, 16, 18, 20, 22, 24, 26, 28, 31, 34, 36, 39, 41, 43, 45, 52, 55, 57, 59, 61, 70, 72, 74, 76, 78, 80, 82, 84, 86, 88, 90, 92, 94, 96, 101, 105, 107, 109, 113, 121, 123, 126, 131, 133, 135, 139, 141, 145, 150, 152, 156, 158, 160, 166, 168, 170, 171, 173, 177, 181, 183, 185, 190, 193, 195, 197, 201, 203, 205, 207, 216, 218, 222, 224, 227, 229, 231, 234, 236, 240, 242, 244, 246, 248, 252, 254, 258, 260, 263, 265, 269, 274, 278, 280, 283, 285, 287, 289, 296, 298, 300, 303, 305, 307, 317, 322, 332, 334, 336, 338, 343, 345, 347, 349, 352, 354, 360, 362, 364, 366, 368, 376, 381, 383, 385, 391, 393, 397, 399, 404, 413, 415, 423, 425, 427, 429, 435, 443, 448, 455, 466, 476, 478, 483, 485, 495, 497, 499, 501, 510, 515, 521, 526, 528, 530, 535, 542, 545, 548, 554, 558, 561, 568, 570, 573, 575, 579, 581, 584, 587, 589, 596, 599, 602, 604, 607, 612, 619, 623, 630, 633, 634, 636, 638, 645, 647, 649, 652, 656, 658, 667, 670, 672, 674, 676, 679, 681, 683, 685, 687, 689, 691, 695, 698, 702, 708, 710, 713, 717, 719, 721, 729, 731, 734, 736, 738, 744, 748, 750, 754, 756, 758, 760, 768, 772, 778, 783, 787, 789, 791, 794, 799, 803, 811, 821, 823, 828, 830, 833, 835, 837, 839, 842, 844, 853, 859, 865, 873, 875, 877, 879, 881, 883, 885, 887, 889, 893, 895, 897, 900, 902, 904, 909, 910, 912, 917, 919, 921, 923, 925, 927, 933, 935, 937, 939, 941, 943, 945, 947, 949, 951, 953, 955, 957, 959, 961, 963, 965, 967, 969, 971, 973, 980, 984, 986, 988, 990, or 992, or an homolog thereof such as those identified in the sequence listing.

[0034] In another aspect, an isolated nucleic acid comprises an isolated nucleic acid comprising a nucleotide sequence encoding a polypeptide having 80% or greater sequence identity to the amino acid sequence set forth in SEQ ID NO: 11, 13, 15, 17, 19, 21, 23, 25, 27, 29, 32, 35, 37, 40, 42, 44, 46, 53, 56, 58, 60, 62, 71, 73, 75, 77, 79, 81, 83, 85, 87, 89, 91, 93, 95, 97, 102, 106, 108, 110, 114, 122, 124, 127, 132, 134, 136, 140, 142, 146, 151, 153, 157, 159, 161, 167, 169, 172, 174, 178, 182, 184, 186, 191, 194, 196, 198, 202, 204, 206, 208, 217, 219, 223, 225, 228, 230, 232, 235, 237, 241, 243, 245, 247, 249, 253, 255, 259, 261, 264, 266, 270, 275, 279, 281, 284, 286, 288, 290, 297, 299, 301, 304, 306, 308, 318, 323, 333, 335, 337, 339, 344, 346, 348, 350, 353, 355, 361, 363, 365, 367, 369, 377, 382, 384, 386, 392, 394, 398, 400, 405, 414, 416, 424, 426, 428, 430, 436, 444, 449, 456, 467, 477, 479, 484, 486, 496, 498, 500, 502, 511, 516, 522, 527, 529, 531, 536, 543, 546, 549, 555, 559, 562, 569, 571, 574, 576, 580, 582, 585, 588, 590, 597, 600, 603, 605, 608, 613, 620, 624, 631, 634, 635, 637, 639, 646, 648, 650, 653, 657, 659, 668, 671, 673, 675, 677, 680, 682, 684, 686, 688, 690, 692, 696, 699, 703, 709, 711, 714, 718, 720, 722, 730, 732, 735, 737, 739, 745, 749, 751, 755, 757, 759, 761, 769, 773, 779, 784, 788, 790, 792, 795, 800, 804, 812, 822, 824, 829, 831, 834, 836, 838, 840, 843, 845, 854, 860, 866, 874, 876, 878, 880, 882, 884, 886, 888, 890, 894, 896, 898, 901, 903, 905, 910, 911, 913, 918, 920, 922, 924, 926, 928, 934, 936, 938, 940, 942, 944, 946, 948, 950, 952, 954, 956, 958, 960, 962, 964, 966, 968, 970, 972, 974, 981, 985, 987, 989, 991, or 993, or an homolog thereof such as those identified in the sequence listing.

[0035] In another aspect, methods of identifying a genetic polymorphism associated with variation in the level of salinity and/or oxidative stress tolerance are provided. The methods include providing a population of plants, and determining whether one or more genetic polymorphisms in the population are genetically linked to the locus for a polypeptide selected from the group consisting of the polypeptides depicted in FIGS. 1-16, functional homologs thereof, and polypeptide sequences in the sequence listing. The correlation between variation in the level of salinity and/or oxidative stress tolerance in plants and/or plant tissues of the population and the presence of the one or more polymorphisms in plants of the population is measured, thereby permitting identification of whether or not the one or more polymorphisms are associated with such variation.

[0036] In another aspect, methods of making a plant line is provided. The methods include determining whether one or more genetic polymorphisms in a population of plants is associated with the locus for a polypeptide selected from the group consisting of the polypeptides depicted in FIGS. 1-16, functional homologs thereof, and polypeptide sequences in the sequence listing, identifying one or more plants in the population in which the presence of at least one allele at the one or more polymorphisms is associated with variation in salt tolerance or oxidative stress tolerance, crossing each of the one or more identified plants with itself or a different plant to produce seed, crossing at least one progeny plant grown from said seed with itself or a different plant, and repeating the crossing steps for an additional 0-5 generations to make the plant line. The at least one allele will be present in the plant line. The method of making a plant line may be applied, for example, to a population of switchgrass plants.

[0037] Unless otherwise defined, all technical and scientific terms used herein have the same meaning as commonly understood by one of ordinary skill in the art to which this invention pertains. Although methods and materials similar or equivalent to those described herein can be used to practice the invention, suitable methods and materials are described below. All publications, patent applications, patents, and other references mentioned herein are incorporated by reference in their entirety. In case of conflict, the present specification, including definitions, will control. In addition, the materials, methods, and examples are illustrative only and not intended to be limiting. The word “comprising” in the claims may be replaced by “consisting essentially of” or by “consisting of,” according to standard practice in patent law.

[0038] The details of one or more embodiments of the invention are set forth in the accompanying drawings and the description below. Other features, objects, and advantages of the invention will be apparent from the description and drawings, and from the claims.

### BRIEF DESCRIPTION OF THE FIGURES

[0039] FIG. 1 is an alignment of amino acid sequences of examples of homologues of Ceres clone no. 210210 (SEQ ID NO: 2), including Public GI ID no. 56202240 (SEQ ID NO: 7) and Ceres ANNOT ID no. 6044037 (SEQ ID NO: 9). In all the alignment Figures shown herein, a dash in an aligned sequence represents a gap, i.e., a lack of an amino acid at that position. Identical amino acids or conserved amino acid substitutions among aligned sequences are identified by boxes. FIG. 1 and the other alignment Figures provided herein were generated using the program MUSCLE version 3.52.

[0040] FIG. 2 is an alignment of amino acid sequences of examples of homologues of Ceres CLONE ID no. 22538 (SEQ ID NO: 11), including Ceres CLONE ID no. 1918442 (SEQ ID NO:13), Ceres ANNOT ID no. 1469916 (SEQ ID NO: 15), Ceres CLONE ID no. 872124 (SEQ ID NO: 17), Ceres CLONE ID no. 1076554 (SEQ ID NO: 19), Ceres CLONE ID no. 1725271 (SEQ ID NO: 23), and Public GI ID no. 115461767 (SEQ ID NO: 30).

[0041] FIG. 3 is an alignment of amino acid sequences of examples of homologues of Ceres CLONE ID no. 560692 (SEQ ID NO: 102), including Public GI ID no. 40807635 (SEQ ID NO: 103), Ceres CLONE ID no. 1798511 (SEQ ID NO: 106), Ceres ANNOT ID no. 1453285 (SEQ ID NO: 110), Ceres CLONE ID no. 31680 (SEQ ID NO: 112), Ceres CLONE ID no. 1117567 (SEQ ID NO: 114), Public GI ID no. 89257437 (SEQ ID NO: 115), Public GI ID no. 92874200 (SEQ ID NO: 116), Public GI ID no. 122230834 (SEQ ID NO: 120), Ceres CLONE ID no. 888852 (SEQ ID NO: 122), Ceres CLONE ID no. 1389074 (SEQ ID NO: 124), Public GI ID no. 11596186 (SEQ ID NO: 125), Ceres CLONE ID no. 1771297 (SEQ ID NO: 127), Public GI ID no. 109238661 (SEQ ID NO: 129), and Ceres ANNOT ID no. 6067853 (SEQ ID NO:134).

[0042] FIG. 4 is an alignment of amino acid sequences of examples of homologues of Ceres CLONE ID no. 547495 (SEQ ID NO: 32), including Public GI ID no. 400991 (SEQ ID NO: 33), Ceres CLONE ID no. 1808896 (SEQ ID NO: 35), Ceres ANNOT ID no. 1528012 (SEQ ID NO: 42), Ceres CLONE ID no. 15384 (SEQ ID NO: 48), Public GI ID no. 92885255 (SEQ ID NO: 63), Public GI ID no. 498902 (SEQ ID NO: 64), Public GI ID no. 8131701 (SEQ ID NO: 68), Public GI ID no. 730547 (SEQ ID NO: 69), Ceres CLONE ID no. 567641 (SEQ ID NO: 71), Ceres CLONE ID no. 1450693 (SEQ ID NO:79), Ceres CLONE ID no. 1731902 (SEQ ID NO: 89), Ceres CLONE ID no. 1760193 (SEQ ID NO: 91), Public GI ID no. 115445581 (SEQ ID NO: 98), and Public GI ID no. 50843988 (SEQ ID NO: 100).

[0043] FIG. 5 is an alignment of amino acid sequences of examples of homologues of Ceres LOCUS ID no. At3g45100 (SEQ ID NO: 138), including Ceres ANNOT ID no. 1476065 (SEQ ID NO: 142), Ceres CLONE ID no. 243208 (SEQ ID NO: 146), and Public GI ID no. 22296298 (SEQ ID NO: 147).

[0044] FIG. 6 is an alignment of amino acid sequences of examples of homologues of Ceres LOCUS ID no. At4g00150 SEQ ID NO: 149), including Ceres ANNOT ID no. 1539565 SEQ ID NO: 151), Public GI ID no. 22087131 SEQ ID NO: 155), Ceres CLONE ID no. 788036 SEQ ID NO: 157), Ceres CLONE ID no. 282885 SEQ ID NO: 159), Ceres CLONE ID no. 1806177 SEQ ID NO: 161), Public GI ID no. 125553722 SEQ ID NO: 163), Public GI ID no. 115459828 SEQ ID NO: 164), and Ceres ANNOT ID no. 6017571 SEQ ID NO: 167).

[0045] FIG. 7 is an alignment of amino acid sequences of examples of homologues of Ceres SEEDLINE ID no. ME06336 (SEQ ID NO: 441), including Ceres CLONE ID no. 1868840 (SEQ ID NO: 597), Public GI ID no. 115458894 (SEQ ID NO: 598), Ceres ANNOT ID no. 1472214 (SEQ ID NO: 600), Public GI ID no. 119224822 (SEQ ID NO: 601), Public GI ID no. 71834076 (SEQ ID NO: 606), Public GI ID no. 116876026 (SEQ ID NO: 609), Public GI ID no. 116248050 (SEQ ID NO: 610), and Public GI ID no. 45260636 (SEQ ID NO: 626).

[0046] FIG. 8 is an alignment of amino acid sequences of examples of homologues of Ceres SEEDLINE ID no. ME01395 (SEQ ID NO: 172), including Ceres CLONE ID no. 151087 (SEQ ID NO: 174), Public GI ID no. 10177809 (SEQ ID NO: 175), Ceres ANNOT ID no. 1504145 (SEQ ID NO: 178), Public GI ID no. 15241572 (SEQ ID NO: 179), Public G1 ID no. 26453064 (SEQ ID NO: 180), Ceres ANNOT ID no. 1451079 (SEQ ID NO: 182), Ceres CLONE ID no. 1786527 (SEQ ID NO: 184), Ceres CLONE ID no. 1005083 (SEQ ID NO: 186), Public GI ID no. 115447467 (SEQ ID NO: 187), Public GI ID no. 125582985 (SEQ ID NO: 188), Public GI ID no. 8346564 (SEQ ID NO: 189), Ceres CLONE ID no. 667071 (SEQ ID NO: 191), Public GI ID no. 125540418 (SEQ ID NO: 192), Ceres ANNOT ID no. 1451080 (SEQ ID NO: 194), Ceres ANNOT ID no. 1504146 (SEQ ID NO: 196), and Ceres ANNOT ID no. 6113886 (SEQ ID NO: 198).

[0047] FIG. 9 is an alignment of amino acid sequences of examples of homologues of Ceres SEEDLINE ID no. ME08564 (SEQ ID NO: 764), including Ceres CLONE ID no. 1928887 (SEQ ID NO: 836), Ceres ANNOT ID no. 1455474 (SEQ ID NO: 840), Public G1 ID no. 849072 (SEQ ID NO: 841), Public GI ID no. 22326727 (SEQ ID NO: 847), Public G1 ID no. 115488682 (SEQ ID NO: 850), Public GI ID no. 562188 (SEQ ID NO: 856), Public G1 ID no. 1245816 (SEQ ID NO: 857), and Ceres CLONE ID no. 375085 (SEQ ID NO: 860).

[0048] Ceres SEEDLINE ID no. ME24091 (SEQ ID NO: 922), Ceres CLONE ID no. 1942871 (SEQ ID NO: 924), Ceres ANNOT ID no. 1528800 (SEQ ID NO: 944), Ceres CLONE ID no. 467508 (SEQ ID NO: 981), Public GI ID no. 92868235 (SEQ ID NO: 982), Ceres CLONE ID no. 228069 (SEQ ID NO: 987), and Public GI ID no. 54306075 (SEQ ID NO: 995).

[0049] FIG. 11 is an alignment of amino acid sequences of examples of homologues of Ceres SEEDLINE ID no. ME03047 (SEQ ID NO: 316), including Ceres CLONE ID no. 1064300 (SEQ ID NO: 331), Ceres CLONE ID no. 613904 (SEQ ID NO:344), Ceres CLONE ID no. 1932709 (SEQ ID NO: 353), Ceres ANNOT ID no. 1494788 (SEQ ID NO: 355), Public GI ID no. 115489526 (SEQ ID NO: 356), Ceres CLONE ID no. 579413 (SEQ ID NO: 359), and Ceres CLONE ID no. 1874905 (SEQ ID NO: 361).

[0050] FIG. 12 is an alignment of amino acid sequences of examples of homologues of Ceres SEEDLINE ID no. ME02441 (SEQ ID NO: 200), including Ceres ANNOT ID no. 1491256 (SEQ ID NO: 204), Ceres CLONE ID no. 1053866 (SEQ ID NO: 217), Ceres CLONE ID no. 1526732 (SEQ ID NO: 219), Ceres CLONE ID no. 2026154 (SEQ ID NO: 230), and Public GI ID no. 115455695 (SEQ ID NO: 233).

[0051] FIG. 13 is an alignment of amino acid sequences of examples of homologues of Ceres SEEDLINE ID no. ME08052 (SEQ ID NO: 697), including Public GI ID no. 115447377 (SEQ ID NO: 706), Ceres CLONE ID no. 696883 (SEQ ID NO: 709), Ceres ANNOT ID no. 1462901 (SEQ ID NO: 711), Ceres CLONE ID no. 1794111 (SEQ ID NO:714), and Ceres CLONE ID no. 1240524 (SEQ ID NO: 718).

[0052] FIG. 14 is an alignment of amino acid sequences of examples of homologues of Ceres SEEDLINE ID no. ME02927 (SEQ ID NO: 239), including Public G1 ID no. 62751057 (SEQ ID NO: 273), Ceres CLONE ID no. 1839135 (SEQ ID NO: 275), Ceres CLONE ID no. 1371813 (SEQ ID NO: 279), Public GI ID no. 40809629 (SEQ ID NO: 291), Ceres CLONE ID no. 1720386 (SEQ ID NO: 297), and Ceres CLONE ID no. 391080 (SEQ ID NO: 299).

[0053] FIG. 15 is an alignment of amino acid sequences of examples of homologues of Ceres SEEDLINE ID no. ME11932 (SEQ ID NO: 892), including Ceres ANNOT ID no. 1471603 (SEQ ID NO: 894), Ceres CLONE ID no. 949027 (SEQ ID NO: 903), Public G1 ID no. 92877259 (SEQ ID NO: 906), Public GI ID no. 61611694 (SEQ ID NO: 907), Ceres CLONE ID no. 779610 (SEQ ID NO: 909), Ceres CLONE ID no. 226231 (SEQ ID NO: 911), and Public GI ID no. 125592880 (SEQ ID NO: 916).

[0054] FIG. 16 is an alignment of amino acid sequences of examples of homologues of Ceres SEEDLINE ID no. ME24091 (SEQ ID NO: 922), Ceres CLONE ID no. 1942871 (SEQ ID NO: 924), Ceres ANNOT ID no. 1528800 (SEQ ID NO: 944), Ceres CLONE ID no. 467508 (SEQ ID NO: 981), Public GI ID no. 92868235 (SEQ ID NO: 982), Ceres CLONE ID no. 228069 (SEQ ID NO: 987), and Public GI ID no. 54306075 (SEQ ID NO: 995).

### DETAILED DESCRIPTION

[0055] The invention features methods and materials related to modulating salinity and/or oxidative stress tolerance levels in plants and/or plant tissues. In some embodiments, the plants may also have increased biomass and/or yield. The methods can include transforming a plant cell with a nucleic acid encoding a salinity and/or oxidative stress tolerance-modulating polypeptide, wherein expression of the polypeptide results in a modulated level of salinity and/or oxidative stress tolerance. Plant cells produced using such methods can be grown to produce plants having an increased salinity, oxidative stress tolerance, and/or biomass, in comparison to wild type plants grown under the same conditions. Such plants, and the seeds of such plants, may be used to produce, for example, yield and/or biomass utilized for biofuel production, such as, but not limited to, ethanol, butanol, and thermochemical conversion.

### I. DEFINITIONS

[0056] “Amino acid” refers to one of the twenty biologically occurring amino acids and to synthetic amino acids, including D/L optical isomers.

[0057] “Cell type-preferential promoter” or “tissue-preferential promoter” refers to a promoter that drives expression preferentially in a target cell type or tissue, respectively, but may also lead to some transcription in other cell types or tissues as well.

[0058] “Control plant” refers to a plant that does not contain the exogenous nucleic acid present in a transgenic plant of interest, but otherwise has the same or similar genetic background as such a transgenic plant. A suitable control plant can be a non-transgenic wild type plant, a non-transgenic segregant from a transformation experiment, or a transgenic plant that contains an exogenous nucleic acid other than the exogenous nucleic acid of interest.

[0059] “Domains” are groups of substantially contiguous amino acids in a polypeptide that can be used to characterize protein families and/or parts of proteins. Such domains have a “fingerprint” or “signature” that can comprise conserved primary sequence, secondary structure, and/or three-dimensional conformation. Generally, domains are correlated with specific in vitro and/or in vivo activities. A domain can have a length of from 10 amino acids to 400 amino acids, e.g., 10 to 50 amino acids, or 25 to 100 amino acids, or to 65 amino acids, or 35 to 55 amino acids, or 45 to 60 amino acids, or 200 to 300 amino acids, or 300 to 400 amino acids.

[0060] “Down-regulation” refers to regulation that decreases production of expression products (mRNA, polypeptide, or both) relative to basal or native states.

[0061] “Exogenous” with respect to a nucleic acid indicates that the nucleic acid is part of a recombinant nucleic acid construct, or is not in its natural environment. For example, an exogenous nucleic acid can be a sequence from one species introduced into another species, i.e., a heterologous nucleic acid. Typically, such an exogenous nucleic acid is introduced into the other species via a recombinant nucleic acid construct. An exogenous nucleic acid can also be a sequence that is native to an organism and that has been reintroduced into cells of that organism. An exogenous nucleic acid that includes a native sequence can often be distinguished from the naturally occurring sequence by the presence of non-natural sequences linked to the exogenous nucleic acid, e.g., non-native regulatory sequences flanking a native sequence in a recombinant nucleic acid construct. In addition, stably transformed exogenous nucleic acids typically are integrated at positions other than the position where the native sequence is found. It will be appreciated that an exogenous nucleic acid may have been introduced into a progenitor and not into the cell under consideration. For example, a transgenic plant containing an exogenous nucleic acid can be the progeny of a cross between a stably transformed plant and a non-transgenic plant. Such progeny are considered to contain the exogenous nucleic acid.

[0062] “Expression” refers to the process of converting genetic information of a polynucleotide into RNA through transcription, which is catalyzed by an enzyme, RNA polymerase, and into protein, through translation of mRNA on ribosomes.

[0063] “Heterologous polypeptide” as used herein refers to a polypeptide that is not a naturally occurring polypeptide in a plant cell, e.g., a transgenic Panicum virgatum plant transformed with and expressing the coding sequence for a nitrogen transporter polypeptide from a Zea mays plant.

[0064] “Isolated nucleic acid” as used herein includes a naturally-occurring nucleic acid, provided that one or both of the sequences immediately flanking that nucleic acid in its naturally-occurring genome is removed or absent. Thus, an isolated nucleic acid includes, without limitation, a nucleic acid that exists as a purified molecule or a nucleic acid molecule that is incorporated into a vector or a virus. A nucleic acid existing among hundreds to millions of other nucleic acids within, for example, cDNA libraries, genomic libraries, or gel slices containing a genomic DNA restriction digest, is not to be considered an isolated nucleic acid.

[0065] “Modulation” of the level of salt tolerance and/or oxidative stress tolerance refers to the change in the level of the salt tolerance and/or oxidative stress tolerance that is observed as a result of expression of, or transcription from, an exogenous nucleic acid in a plant cell. The change in level is measured relative to the corresponding level in control plants.

[0066] “Nucleic acid” and “polynucleotide” are used interchangeably herein, and refer to both RNA and DNA, including cDNA, genomic DNA, synthetic DNA, and DNA or RNA containing nucleic acid analogs. Polynucleotides can have any three-dimensional structure. A nucleic acid can be double-stranded or single-stranded (i.e., a sense strand or an antisense strand). Non-limiting examples of polynucleotides include genes, gene fragments, exons, introns, messenger RNA (mRNA), transfer RNA, ribosomal RNA, siRNA, micro-RNA, ribozymes, cDNA, recombinant polynucleotides, branched polynucleotides, nucleic acid probes and nucleic acid primers. A polynucleotide may contain unconventional or modified nucleotides.

[0067] “Operably linked” refers to the positioning of a regulatory region and a sequence to be transcribed in a nucleic acid so that the regulatory region is effective for regulating transcription or translation of the sequence. For example, to operably link a coding sequence and a regulatory region, the translation initiation site of the translational reading frame of the coding sequence is typically positioned between one and about fifty nucleotides downstream of the regulatory region. A regulatory region can, however, be positioned as much as about 5,000 nucleotides upstream of the translation initiation site, or about 2,000 nucleotides upstream of the transcription start site.

[0068] “Polypeptide” as used herein refers to a compound of two or more subunit amino acids, amino acid analogs, or other peptidomimetics, regardless of post-translational modification, e.g., phosphorylation or glycosylation. The subunits may be linked by peptide bonds or other bonds such as, for example, ester or ether bonds. Full-length polypeptides, truncated polypeptides, point mutants, insertion mutants, splice variants, chimeric proteins, and fragments thereof are encompassed by this definition.

[0069] “Progeny” includes descendants of a particular plant or plant line. Progeny of an instant plant include seeds formed on F₁, F₂, F₃, F₄, F₅, F₆ and subsequent generation plants, or seeds formed on BC₁, BC₂, BC₃, and subsequent generation plants, or seeds formed on F₁BC₁, F₁BC₂, F₁BC₃, and subsequent generation plants. The designation F₁ refers to the progeny of a cross between two parents that are genetically distinct. The designations F₂, F₃, F₄, F₅ and F₆ refer to subsequent generations of self- or sib-pollinated progeny of an F₁ plant.

[0070] “Regulatory region” refers to a nucleic acid having nucleotide sequences that influence transcription or translation initiation and rate, and stability and/or mobility of a transcription or translation product. Regulatory regions include, without limitation, promoter sequences, enhancer sequences, response elements, protein recognition sites, inducible elements, protein binding sequences, 5′ and 3′ untranslated regions (UTRs), transcriptional start sites, termination sequences, polyadenylation sequences, introns, and combinations thereof. A regulatory region typically comprises at least a core (basal) promoter. A regulatory region also may include at least one control element, such as an enhancer sequence, an upstream element or an upstream activation region (UAR). For example, a suitable enhancer is a cis-regulatory element (-212 to -154) from the upstream region of the octopine synthase (ocs) gene. Fromm et al., The Plant Cell, 1:977-984 (1989).

[0071] “Up-regulation” refers to regulation that increases the level of an expression product (mRNA, polypeptide, or both) relative to basal or native states.

[0072] “Vector” refers to a replicon, such as a plasmid, phage, or cosmid, into which another DNA segment may be inserted so as to bring about the replication of the inserted segment. Generally, a vector is capable of replication when associated with the proper control elements. The term “vector” includes cloning and expression vectors, as well as viral vectors and integrating vectors. An “expression vector” is a vector that includes a regulatory region.

[0073] “Oxidative stress” can be defined as the set of environmental conditions under which a plant will begin to suffer the effects of elevated ROS/ROI/AOS concentration, such as decreases in enzymatic activity, DNA breakage, DNA-protein crosslinking, necrosis and stunted growth. For these reasons, plants experiencing oxidative stress typically exhibit a significant reduction in biomass and/or yield. Plant species vary in their capacity to tolerate ROS/ROI/AOS.

[0074] Elevated oxidative stress may be caused by natural, geological processes and by human activities, such as pollution. Since plant species vary in their capacity to tolerate oxidative stress, the precise environmental conditions that cause stress cannot be generalized. However, under oxidative stress conditions, oxidative stress tolerant plants produce higher biomass, yield and survivorship than plants that are not oxidative stress tolerant. Differences in physical appearance, recovery and yield can be quantified.

[0075] Photosynthetic efficiency: photosynthetic efficiency, or electron transport via photosystem II, is estimated by the relationship between Fm, the maximum fluorescence signal and the variable fluorescence, Fv. A reduction in the optimum quantum yield (Fv/Fm) indicates stress and can be used to monitor the performance of transgenic plants compared to non-transgenic plants under salt or oxidative stress conditions.

[0076] Salicylic Acid Growth Index (SAGI): Photosynthetic efficiency×seedling area.

[0077] Salt growth index (SGI): Photosynthetic efficiency×seedling area (under salinity stress condition).

[0078] Salinity: Plant species vary in their capacity to tolerate salinity “Salinity” can be defined as the set of environmental conditions under which a plant will begin to suffer the effects of elevated salt concentration, such as ion imbalance, decreased stomatal conductance, decreased photosynthesis, decreased growth rate, increased cell death, loss of turgor (wilting), or ovule abortion. For these reasons, plants experiencing salinity stress typically exhibit a significant reduction in biomass and/or yield.

[0079] Elevated salinity may be caused by natural, geological processes and by human activities, such as pollution. Since plant species vary in their capacity to tolerate salinity, the precise environmental conditions that cause stress cannot be generalized. However, under saline conditions, salinity tolerant plants produce higher biomass, yield and survivorship than plants that are not saline tolerant. Differences in physical appearance, recovery and yield can be quantified.

[0080] Elevated salinity may be caused by natural, geological processes and by human activities, such as irrigation. Since plant species vary in their capacity to tolerate water deficit, the precise environmental salt conditions that cause stress cannot be generalized. However, under saline conditions, salt tolerant plants produce higher biomass, yield and survivorship than plants that are not salt tolerant. Differences in physical appearance, recovery and yield can be quantified and statistically analyzed using well known measurement and analysis methods.

### II. POLYPEPTIDES

[0081] Polypeptides described herein include salinity and/or oxidative stress tolerance-modulating polypeptides. Salinity and/or oxidative stress tolerance-modulating polypeptides can be effective to modulate salinity and/or oxidative stress tolerance levels when expressed in a plant or plant cell. Such polypeptides typically contain at least one domain indicative of salinity and/or oxidative stress tolerance-modulating polypeptides, as described in more detail herein. Salinity and/or oxidative stress tolerance-modulating polypeptides typically have an HMM bit score that is greater than 15, as described in more detail herein. In some embodiments, salinity and/or oxidative stress tolerance-modulating polypeptides have 80% or greater identity to SEQ ID NOs: 2, 11, 102, 32, 138, 149, 441, 172, 764, 389, 316, 200, 697, 239, 892, 922, or 693 as described in more detail herein.

[0082] A. Domains Indicative of Salinity and/or Oxidative Stress Tolerance-Modulating Polypeptides

[0083] A salinity and/or oxidative stress tolerance-modulating polypeptide can contain a XYPPX repeat domain, which is predicted to be characteristic of a salinity and/or oxidative stress tolerance-modulating polypeptide. For example, SEQ ID NO: 11 sets forth the amino acid sequence of an Arabidopsis clone, identified herein as Ceres CLONE ID no. 22538, that is predicted to encode a polypeptide containing XYPPX repeat domains from residues 60 to 64, 69 to 73, 78 to 82, 87 to 91, and 15 to 19. Examples of other XYPPX domains are shown in the sequence listing. This repeat is found in a wide variety of proteins and generally consists of the motif XYPPX where X can be any amino acid. The family includes annexin VII ANX7_DICDI, the carboxy tail of certain rhodopsins OPSD_LOLSU. This family also includes plaque matrix proteins; however this motif is embedded in a ten residue repeat in FP1_MYTED.

[0084] A salinity and/or oxidative stress tolerance-modulating polypeptide can contain a Cystatin domain, which is predicted to be characteristic of a salinity and/or oxidative stress tolerance-modulating polypeptide. For example, SEQ ID NO: 102 sets forth the amino acid sequence of an Glycine max clone, identified herein as Ceres CLONE ID no. 560692, that is predicted to encode a polypeptide containing a Cystatin domain from residues 27 to 87. Examples of other Cystatin domains are shown in the sequence listing. Peptide proteinase inhibitors contain Cystatin domains and can be found as single domain proteins or as single or multiple domains within proteins; these are referred to as either simple or compound inhibitors, respectively. In many cases they are synthesised as part of a larger precursor protein, either as a prepropeptide or as an N-terminal domain associated with an inactive peptidase or zymogen. This domain prevents access of the substrate to the active site. Removal of the N-terminal inhibitor domain either by interaction with a second peptidase or by autocatalytic cleavage activates the zymogen. Other inhibitors interact direct with proteinases using a simple noncovalent lock and key mechanism; while yet others use a conformational change-based trapping mechanism that depends on their structural and thermodynamic properties.

[0085] A salinity and/or oxidative stress tolerance-modulating polypeptide can contain an Kyprides, Ouzounis, Woese (KOW) motif domain, which is predicted to be characteristic of a salinity and/or oxidative stress tolerance-modulating polypeptide. For example, SEQ ID NO: 32 sets forth the amino acid sequence of an Glycine max clone, identified herein as Ceres CLONE ID no. 547495, that is predicted to encode a polypeptide containing a KOW motif domain from residues 7 to 40. Examples of other KOW domains are shown in the sequence listing. The KOW motif is found in a variety of ribosomal proteins and NusG. Ribosomes are the particles that catalyze mRNA-directed protein synthesis in all organisms. The codons of the mRNA are exposed on the ribosome to allow tRNA binding. This leads to the incorporation of amino acids into the growing polypeptide chain in accordance with the genetic information. Incoming amino acid monomers enter the ribosomal A site in the form of aminoacyl-tRNAs complexed with elongation factor Tu (EF-Tu) and GTP. The growing polypeptide chain, situated in the P site as peptidyl-tRNA, is then transferred to aminoacyl-tRNA and the new peptidyl-tRNA, extended by one residue, is translocated to the P site with the aid the elongation factor G (EF-G) and GTP as the deacylated tRNA is released from the ribosome through one or more exit sites. About ⅔ of the mass of the ribosome consists of RNA and ⅓ of protein. The proteins are named in accordance with the subunit of the ribosome which they belong to—the small (S1 to S31) and the large (L1 to L44). Usually they decorate the rRNA cores of the subunits.

[0086] A salinity and/or oxidative stress tolerance-modulating polypeptide that contains a KOW motif domain can also contain a Ribosomal L27e protein family domain, which is predicted to be characteristic of a salinity and/or oxidative stress tolerance-modulating polypeptide. For example, SEQ ID NO: 32 sets forth the amino acid sequence of an Glycine max clone, identified herein as Ceres CLONE ID no. 547495, that is predicted to encode a polypeptide containing a Ribosomal L27e protein family domain from residues 52 to 135. Examples of other Ribosomal L27e protein family domains are shown in the sequence listing. The N-terminal region of the eukaryotic ribosomal L27 has the KOW motif. C-terminal region is represented by the Ribosomal L27e protein family.

[0087] A salinity and/or oxidative stress tolerance-modulating polypeptide can contain a Glycosyl transferases group 1 domain, which is predicted to be characteristic of a salinity and/or oxidative stress tolerance-modulating polypeptide. For example, SEQ ID NO: 138 sets forth the amino acid sequence of an Arabidopsis clone, identified herein as Ceres LOCUS ID no. At3g45100, that is predicted to encode a polypeptide containing a Glycosyl transferases group 1 domain from residues 187 to 356. Examples of other Glycosyl transferases group 1 domains are shown in the sequence listing. The biosynthesis of disaccharides, oligosaccharides and polysaccharides involves the action of hundreds of different glycosyltransferases. These enzymes catalyse the transfer of sugar moieties from activated donor molecules to specific acceptor molecules, forming glycosidic bonds. A classification of glycosyltransferases using nucleotide diphospho-sugar, nucleotide monophospho-sugar and sugar phosphates and related proteins into distinct sequence based families has been described. The same three-dimensional fold is expected to occur within each of the families. Because 3-D structures are better conserved than sequences, several of the families defined on the basis of sequence similarities may have similar 3-D structures and therefore form ‘clans’. Proteins containingn this domain transfer UDP, ADP, GDP or CMP linked sugars to a variety of substrates, including glycogen, fructose-6-phosphate and lipopolysaccharides. The bacterial enzymes are involved in various biosynthetic processes that include exopolysaccharide biosynthesis, lipopolysaccharide core biosynthesis and the biosynthesis of the slime polysaccaride colanic acid.

[0088] A salinity and/or oxidative stress tolerance-modulating polypeptide can contain a Glycosyl transferases group 1 domain and additionally contain a PIGA (GPI anchor biosynthesis) domain, which is predicted to be characteristic of a salinity and/or oxidative stress tolerance-modulating polypeptide. For example, SEQ ID NO: 138 sets forth the amino acid sequence of an Arabidopsis clone, identified herein as Ceres LOCUS ID no. At3g45100, which is predicted to encode a polypeptide containing a PIGA domain from residues 46 to 135. Examples of other PIGA domains are shown in the sequence listing. This domain is found on phosphatidylinositol n-acetylglucosaminyltransferase proteins. These proteins are involved in GPI anchor biosynthesis and are associated with disease the paroxysmal nocturnal haemoglobinuria.

[0089] A salinity and/or oxidative stress tolerance-modulating polypeptide can contain a GRAS family transcription factor domain, which is predicted to be characteristic of a salinity and/or oxidative stress tolerance-modulating polypeptide. For example, SEQ ID NO: 149 sets forth the amino acid sequence of an Arabidopsis clone, identified herein as Ceres LOCUS ID no. At4g00150, which is predicted to encode a polypeptide containing a GRAS family transcription factor domain from residues 179 to 467. Examples of other GRAS family transcription factor domains are shown in the sequence listing. Sequence analysis of the products of the GRAS (GAI, RGA, SCR) gene family indicates that they share a variable N-terminus and a highly conserved C-terminus that contains five recognizable motifs. Proteins in the GRAS family are transcription factors that seem to be involved in development and other processes. Mutation of the SCARECROW (SCR) gene results in a radial pattern defect, loss of a ground tissue layer, in the root. The PAT1 protein is involved in phytochrome A signal transduction. GRAS proteins contain a conserved region of about 350 amino acids that can be divided in 5 motifs, found in the following order: leucine heptad repeat I, the VHIID motif, leucine heptad repeat II, the PFYRE motif and the SAW motif. Plant specific GRAS proteins have parallels in their motif structure to the animal Signal Transducers and Activators of Transcription (STAT) family of proteins which suggests also some parallels in their functions.

[0090] A salinity and/or oxidative stress tolerance-modulating polypeptide can contain a Cytochrome P450 domain, which is predicted to be characteristic of a salinity and/or oxidative stress tolerance-modulating polypeptide. For example, SEQ ID NO: 441 sets forth the amino acid sequence of an Arabidopsis clone, identified herein as Ceres SEEDLINE ID no. ME06336, which is predicted to encode a polypeptide containing a Cytochrome P450 domain from residues 228 to 466. Examples of other Cytochrome P450 domains are shown in the sequence listing. Cytochrome P450s are haem-thiolate proteins involved in the oxidative degradation of various compounds. They are particularly well known for their role in the degradation of environmental toxins and mutagens. The family of P450s is divided into numerous subfamilies, for example, the sequence of SEQ ID NO:144 falls within the CYP724B subfamily, and further within the third group of the subfamily CYP724B3. Sequence conservation is relatively low within the family—there are only 3 absolutely conserved residues—but their general topography and structural fold are highly conserved. The conserved core is composed of a coil termed the ‘meander’, a four-helix bundle, helices J and K, and two sets of beta-sheets. These constitute the haem-binding loop (with an absolutely conserved cysteine that serves as the 5th ligand for the haem iron), the proton-transfer groove and the absolutely conserved EXXR motif in helix K. While prokaryotic P450s are soluble proteins, most eukaryotic P450s are associated with microsomal membranes. Their general enzymatic function is to catalyse regiospecific and stereospecific oxidation of non-activated hydrocarbons at physiological temperatures.

[0091] A salinity and/or oxidative stress tolerance-modulating polypeptide can contain a Cyclin, N-terminal domain, which is predicted to be characteristic of a salinity and/or oxidative stress tolerance-modulating polypeptide. For example, SEQ ID NO: 764 sets forth the amino acid sequence of an Arabidopsis clone, identified herein as Ceres SEEDLINE ID no. ME08564, which is predicted to encode a polypeptide containing a Cyclin, N-terminal domain from residues 196 to 323. Examples of other Cyclin, N-terminal domains are shown in the sequence listing. Cyclins are eukaryotic proteins that play an active role in controlling nuclear cell division cycles, and regulate cyclin dependent kinases (CDKs). Cyclins, together with the p34 (cdc2) or cdk2 kinases, form the Maturation Promoting Factor (MPF). There are two main groups of cyclins, G1/S cyclins, which are essential for the control of the cell cycle at the G1/S (start) transition, and G2/M cyclins, which are essential for the control of the cell cycle at the G2/M (mitosis) transition. G2/M cyclins accumulate steadily during G2 and are abruptly destroyed as cells exit from mitosis (at the end of the M-phase). In most species, there are multiple forms of G1 and G2 cyclins. For example, in vertebrates, there are two G2 cyclins, A and B, and at least three G1 cyclins, C, D, and E.

[0092] A salinity and/or oxidative stress tolerance-modulating polypeptide can contain a Cyclin, N-terminal domain and additionally a Cyclin, C-terminal domain, which is predicted to be characteristic of a salinity and/or oxidative stress tolerance-modulating polypeptide. For example, SEQ ID NO: 764 sets forth the amino acid sequence of an Arabidopsis clone, identified herein as Ceres SEEDLINE ID no. ME08564, which is predicted to encode a polypeptide containing a Cyclin, C-terminal domain from residues 325 to 452. Examples of other Cyclin, C-terminal domains are shown in the sequence listing.

[0093] A salinity and/or oxidative stress tolerance-modulating polypeptide can contain a MATH domain, which is predicted to be characteristic of a salinity and/or oxidative stress tolerance-modulating polypeptide. For example, SEQ ID NO: 389 sets forth the amino acid sequence of an Arabidopsis clone, identified herein as Ceres SEEDLINE ID no. ME03280, which is predicted to encode a polypeptide containing a MATH domain from residues 245 to 370. Examples of other MATH domains are shown in the sequence listing. This motif has been called the Meprin and TRAF-Homology (MATH) domain. This domain is hugely expanded in the nematode C. elegans. Although apparently functionally unrelated, intracellular TRAFs and extracellular meprins share a conserved region of about 180 residues, the meprin and TRAF homology (MATH) domain. Meprins are mammalian tissue-specific metalloendopeptidases of the astacin family implicated in developmental, normal and pathological processes by hydrolyzing a variety of proteins. Various growth factors, cytokines, and extracellular matrix proteins are substrates for meprins. TRAF proteins were first isolated by their ability to interact with TNF receptors. They promote cell survival by the activation of downstream protein kinases and, finally, transcription factors of the NF-kB and AP-1 family. The TRAF proteins are composed of 3 structural domains: a RING finger in the N-terminal part of the protein, one to seven TRAF zinc in the middle and the MATH domain in the C-terminal part. The MATH domain is necessary and sufficient for self-association and receptor interaction.

[0094] A salinity and/or oxidative stress tolerance-modulating polypeptide can contain a LSD1 zinc finger domain, which is predicted to be characteristic of a salinity and/or oxidative stress tolerance-modulating polypeptide. For example, SEQ ID NO: 316 sets forth the amino acid sequence of an Arabidopsis clone, identified herein as Ceres SEEDLINE ID no. ME03047, which is predicted to encode a polypeptide containing a LSD1 zinc finger domain from residues 95 to 119. Examples of other LSD1 zinc finger domains are shown in the sequence listing. Also, for example, SEQ ID NO: 239 sets forth the amino acid sequence of an Arabidopsis clone, identified herein as Ceres SEEDLINE ID no. ME02927, which is predicted to encode a polypeptide containing a LSD1 zinc finger domain from residues 114 to 138. This domain family consists of several plant specific LSD1 zinc finger domains. Arabidopsis lsd1 mutants are hyper-responsive to cell death initiators and fail to limit the extent of cell death. Superoxide is a necessary and sufficient signal for cell death propagation. LSD1 monitors a superoxide-dependent signal and negatively regulates a plant cell death pathway. LSD1 protein contains three zinc finger domains, defined by CxxCxRxxLMYxxGASxVxCxxC. It has been suggested that LSD1 defines a zinc finger protein subclass and that LSD1 regulates transcription, via either repression of a pro-death pathway or activation of an anti-death pathway, in response to signals emanating from cells undergoing pathogen-induced hypersensitive cell death.

[0095] A salinity and/or oxidative stress tolerance-modulating polypeptide can contain a Glycolipid transfer protein (GLTP) domain, which is predicted to be characteristic of a salinity and/or oxidative stress tolerance-modulating polypeptide. For example, SEQ ID NO: 697 sets forth the amino acid sequence of an Arabidopsis clone, identified herein as Ceres SEEDLINE ID no. ME08052, which is predicted to encode a polypeptide containing a Glycolipid transfer protein (GLTP) domain from residues 10 to 198. Examples of other GLTP domains are shown in the sequence listing. GLTP is a cytosolic protein that catalyses the intermembrane transfer of glycolipids.

[0096] A salinity and/or oxidative stress tolerance-modulating polypeptide can contain a IQ calmodulin-binding motif domain, which is predicted to be characteristic of a salinity and/or oxidative stress tolerance-modulating polypeptide. For example, SEQ ID NO: 922 sets forth the amino acid sequence of an Arabidopsis clone, identified herein as Ceres SEEDLINE ID no. ME24091, that is predicted to encode a polypeptide containing an IQ calmodulin-binding motif domain from residues 115 to 135. Examples of other IQ calmodulin-binding motif domains are shown in the sequence listing. Calmodulin (CaM) is recognized as a major calcium sensor and orchestrator of regulatory events through its interaction with a diverse group of cellular proteins. Three classes of recognition motifs exist for many of the known CaM binding proteins; the IQ motif as a consensus for Ca2⁺-independent binding and two related motifs for Ca2⁺-dependent binding, termed 18-14 and 1-5-10 based on the position of conserved hydrophobic residues.

[0097] In some embodiments, a salinity and/or oxidative stress tolerance-modulating polypeptide is truncated at the amino- or carboxy-terminal end of a naturally occurring polypeptide. A truncated polypeptide may retain certain domains of the naturally occurring polypeptide while lacking others. Thus, length variants that are up to 5 amino acids shorter or longer typically exhibit the salinity and/or oxidative stress tolerance-modulating activity of a truncated polypeptide. In some embodiments, a truncated polypeptide is a dominant negative polypeptide. Expression in a plant of such a truncated polypeptide confers a difference in the level of salinity and/or oxidative stress tolerance in a plant and/or plant tissue as compared to the corresponding level a control plant and/or tissue thereof that does not comprise the truncation.

[0098] B. Functional Homologs Identified by Reciprocal BLAST

[0099] In some embodiments, one or more functional homologs of a reference salinity and/or oxidative stress tolerance-modulating polypeptide defined by one or more of the pfam descriptions indicated above are suitable for use as salinity and/or oxidative stress tolerance-modulating polypeptides. A functional homolog is a polypeptide that has sequence similarity to a reference polypeptide, and that carries out one or more of the biochemical or physiological function(s) of the reference polypeptide. A functional homolog and the reference polypeptide may be natural occurring polypeptides, and the sequence similarity may be due to convergent or divergent evolutionary events. As such, functional homologs are sometimes designated in the literature as homologs, or orthologs, or paralogs. Variants of a naturally occurring functional homolog, such as polypeptides encoded by mutants of a wild type coding sequence, may themselves be functional homologs. Functional homologs can also be created via site-directed mutagenesis of the coding sequence for a salinity and/or oxidative stress tolerance-modulating polypeptide, or by combining domains from the coding sequences for different naturally-occurring salinity and/or oxidative stress tolerance-modulating polypeptides (“domain swapping”). The term “functional homolog” is sometimes applied to the nucleic acid that encodes a functionally homologous polypeptide.

[0100] Functional homologs can be identified by analysis of nucleotide and polypeptide sequence alignments. For example, performing a query on a database of nucleotide or polypeptide sequences can identify homologs of salinity and/or oxidative stress tolerance-modulating polypeptides. Sequence analysis can involve BLAST, Reciprocal BLAST, or PSI-BLAST analysis of nonredundant databases using a salinity and/or oxidative stress tolerance-modulating polypeptide amino acid sequence as the reference sequence. Amino acid sequence is, in some instances, deduced from the nucleotide sequence. Those polypeptides in the database that have greater than 20% sequence identity are candidates for further evaluation for suitability as a salinity and/or oxidative stress tolerance-modulating polypeptide. Amino acid sequence similarity allows for conservative amino acid substitutions, such as substitution of one hydrophobic residue for another or substitution of one polar residue for another. If desired, manual inspection of such candidates can be carried out in order to narrow the number of candidates to be further evaluated. Manual inspection can be performed by selecting those candidates that appear to have domains present in salinity and/or oxidative stress tolerance-modulating polypeptides, e.g., conserved functional domains.

[0101] Conserved regions can be identified by locating a region within the primary amino acid sequence of a salinity and/or oxidative stress tolerance-modulating polypeptide that is a repeated sequence, forms some secondary structure (e.g., helices and beta sheets), establishes positively or negatively charged domains, or represents a protein motif or domain. See, e.g., the Pfam web site describing consensus sequences for a variety of protein motifs and domains on the World Wide Web at sanger.ac.uk/Software/Pfam/ and pfam.janelia.org/. A description of the information included at the Pfam database is described in Sonnhammer et al., Nucl. Acids Res., 26:320-322 (1998); Sonnhammer et al., Proteins, 28:405-420 (1997); and Bateman et al., Nucl. Acids Res., 27:260-262 (1999). Conserved regions also can be determined by aligning sequences of the same or related polypeptides from closely related species. Closely related species preferably are from the same family. In some embodiments, alignment of sequences from two different species is adequate.

[0102] Typically, polypeptides that exhibit at least about 20% amino acid sequence identity are useful to identify conserved regions. Conserved regions of related polypeptides exhibit at least 45% amino acid sequence identity (e.g., at least 50%, at least 60%, at least 70%, at least 80%, or at least 90% amino acid sequence identity). In some embodiments, a conserved region exhibits at least 92%, 94%, 96%, 98%, or 99% amino acid sequence identity.

[0103] Examples of amino acid sequences of functional homologs of the polypeptide set forth in SEQ ID NO: 2 are provided in FIG. 1 and in the Sequence Listing. Such functional homologs include SEQ ID NO: 4, 6, 7, and 9. In some cases, a functional homolog of SEQ ID NO: 2 has an amino acid sequence with at least 50% sequence identity, e.g., 50%, 52%, 56%, 59%, 61%, 65%, 70%, 75%, 80%, 85%, 90%, 95%, 97%, 98%, or 99% sequence identity, to the amino acid sequence set forth in SEQ ID NO: 2.

[0104] Examples of amino acid sequences of functional homologs of the polypeptide set forth in SEQ ID NO: 11 are provided in FIG. 2 and in the Sequence Listing. Such functional homologs include SEQ ID NO: 13, 15, 17, 19, 21, 23, 25, 27, 29, and 30. In some cases, a functional homolog of SEQ ID NO: 11 has an amino acid sequence with at least 50% sequence identity, e.g., 50%, 52%, 56%, 59%, 61%, 65%, 70%, 75%, 80%, 85%, 90%, 95%, 97%, 98%, or 99% sequence identity, to the amino acid sequence set forth in SEQ ID NO: 11.

[0105] Examples of amino acid sequences of functional homologs of the polypeptide set forth in SEQ ID NO: 102 are provided in FIG. 3 and in the Sequence Listing. Such functional homologs include (SEQ ID NO: 103, 104, 106, 108, 110, 112, 114, 115, 116, 117, 118, 119, 120, 122, 124, 125, 127, 128, 129, 130, 132, 134, and 136. In some cases, a functional homolog of SEQ ID NO: 102 has an amino acid sequence with at least 50% sequence identity, e.g., 50%, 52%, 56%, 59%, 61%, 65%, 70%, 75%, 80%, 85%, 90%, 95%, 97%, 98%, or 99% sequence identity, to the amino acid sequence set forth in SEQ ID NO: 102.

[0106] Examples of amino acid sequences of functional homologs of the polypeptide set forth in SEQ ID NO: 32 are provided in FIG. 4 and in the Sequence Listing. Such functional homologs include SEQ ID NO: 33, 35, 37, 38, 40, 42, 44, 46, 48, 49, 51, 53, 54, 56, 58, 60, 62, 63, 64, 65, 66, 67, 68, 69, 71, 73, 75, 77, 79, 81, 83, 85, 87, 89, 91, 93, 95, 97, 98, 99, and 100. In some cases, a functional homolog of SEQ ID NO: 32 has an amino acid sequence with at least 50% sequence identity, e.g., 50%, 52%, 56%, 59%, 61%, 65%, 70%, 75%, 80%, 85%, 90%, 95%, 97%, 98%, or 99% sequence identity, to the amino acid sequence set forth in SEQ ID NO: 32.

[0107] Examples of amino acid sequences of functional homologs of the polypeptide set forth in SEQ ID NO: 138 are provided in FIG. 5 and in the Sequence Listing. Such functional homologs include SEQ ID NO: 140, 142, 144, 146, and 147. In some cases, a functional homolog of SEQ ID NO: 138 has an amino acid sequence with at least 50% sequence identity, e.g., 50%, 52%, 56%, 59%, 61%, 65%, 70%, 75%, 80%, 85%, 90%, 95%, 97%, 98%, or 99% sequence identity, to the amino acid sequence set forth in SEQ ID NO: 138.

[0108] Examples of amino acid sequences of functional homologs of the polypeptide set forth in SEQ ID NO: 149 are provided in FIG. 6 and in the Sequence Listing. Such functional homologs include SEQ ID NO: 151, 155, 157, 159, 161, 163, 164, and 167. In some cases, a functional homolog of SEQ ID NO: 149 has an amino acid sequence with at least 50% sequence identity, e.g., 50%, 52%, 56%, 59%, 61%, 65%, 70%, 75%, 80%, 85%, 90%, 95%, 97%, 98%, or 99% sequence identity, to the amino acid sequence set forth in SEQ ID NO: 149.

[0109] Examples of amino acid sequences of functional homologs of the polypeptide set forth in SEQ ID NO: 441 are provided in FIG. 7 and in the Sequence Listing. Such functional homologs include SEQ ID NO: 442, 444, 445, 446, 447, 449, 450, 451, 452, 453, 454, 456, 457, 458, 459, 460, 461, 462, 463, 464, 465, 467, 468, 469, 470, 471, 472, 473, 474, 475, 477, 479, 480, 481, 482, 484, 486, 487, 489, 490, 491, 492, 493, 494, 496, 498, 500, 502, 503, 504, 505, 506, 507, 508, 509, 511, 512, 513, 514, 516, 517, 518, 519, 520, 522, 523, 524, 525, 527, 529, 531, 532, 533, 534, 536, 537, 538, 539, 540, 541, 543, 544, 546, 547, 549, 550, 551, 552, 553, 555, 556, 557, 559, 560, 562, 563, 564, 565, 566, 567, 569, 571, 572, 574, 576, 577, 578, 580, 582, 583, 585, 586, 588, 590, 591, 592, 593, 594, 595, 597, 598, 600, 601, 603, 605, 606, 608, 609, 610, 611, 613, 614, 615, 616, 617, 618, 620, 622, 624, 625, 626, 627, 629, 631, 633, 635, 637, 639, 640, 641, 642, 643, 644, 646, 648, 650, 651, 653, 654, 655, 657, 659, 660, 661, 662, 663, 664, 665, 666, 668, 669, 671, 673, 675, 677, 678, 680, 682, 684, 686, 688, and 690. In some cases, a functional homolog of SEQ ID NO: 441 has an amino acid sequence with at least 50% sequence identity, e.g., 50%, 52%, 56%, 59%, 61%, 65%, 70%, 75%, 80%, 85%, 90%, 95%, 97%, 98%, or 99% sequence identity, to the amino acid sequence set forth in SEQ ID NO: 441.

[0110] Examples of amino acid sequences of functional homologs of the polypeptide set forth in SEQ ID NO: 172 are provided in FIG. 8 and in the Sequence Listing. Such functional homologs include SEQ ID NO: 174, 175, 178, 179, 180, 182, 184, 186, 187, 188, 189, 191, 192, 194, 196, and 198. In some cases, a functional homolog of SEQ ID NO: 172 has an amino acid sequence with at least 50% sequence identity, e.g., 50%, 52%, 56%, 59%, 61%, 65%, 70%, 75%, 80%, 85%, 90%, 95%, 97%, 98%, or 99% sequence identity, to the amino acid sequence set forth in SEQ ID NO: 172.

[0111] Examples of amino acid sequences of functional homologs of the polypeptide set forth in SEQ ID NO: 764 are provided in FIG. 9 and in the Sequence Listing. Such functional homologs include SEQ ID NO: 765, 766, 767, 769, 770, 771, 773, 774, 775, 776, 777, 779, 780, 781, 782, 784, 785, 786, 788, 790, 792, 793, 795, 796, 797, 798, 801, 802, 804, 805, 808, 809, 810, 812, 813, 814, 815, 816, 817, 818, 819, 820, 822, 824, 825, 826, 827, 829, 832, 834, 836, 838, 840, 841, 843, 845, 846, 847, 848, 849, 850, 851, 852, 854, 855, 856, 857, 858, 860, 861, 862, 863, 864, 867, 870, 871, 872, 874, 876, 878, 880, 882, 884, 886, 888, and 890. In some cases, a functional homolog of SEQ ID NO: 764 has an amino acid sequence with at least 50% sequence identity, e.g., 50%, 52%, 56%, 59%, 61%, 65%, 70%, 75%, 80%, 85%, 90%, 95%, 97%, 98%, or 99% sequence identity, to the amino acid sequence set forth in SEQ ID NO: 764.

[0112] Examples of amino acid sequences of functional homologs of the polypeptide set forth in SEQ ID NO: 398 are provided in FIG. 10 and in the Sequence Listing. Such functional homologs include SEQ ID NO: 392, 394, 396, 400, 401, 402, 403, 405, 406, 407, 408, 410, 411, 412, 414, 416, 417, 418, 419, 421, 422, 424, 426, 428, 430, 431, 432, 433, 434, 436, 437, and 438. In some cases, a functional homolog of SEQ ID NO: 398 has an amino acid sequence with at least 50% sequence identity, e.g., 50%, 52%, 56%, 59%, 61%, 65%, 70%, 75%, 80%, 85%, 90%, 95%, 97%, 98%, or 99% sequence identity, to the amino acid sequence set forth in SEQ ID NO: 398.

[0113] Examples of amino acid sequences of functional homologs of the polypeptide set forth in SEQ ID NO: 316 are provided in FIG. 11 and in the Sequence Listing. Such functional homologs include SEQ ID NO: 318, 319, 320, 321, 323, 324, 331, 333, 335, 337, 339, 340, 344, 346, 348, 350, 351, 353, 355, 356, 357, 359, 361, 363, 365, 367, 369, 374, 375, 377, 378, 380, 382, 384, and 386. In some cases, a functional homolog of SEQ ID NO: 316 has an amino acid sequence with at least 50% sequence identity, e.g., 50%, 52%, 56%, 59%, 61%, 65%, 70%, 75%, 80%, 85%, 90%, 95%, 97%, 98%, or 99% sequence identity, to the amino acid sequence set forth in SEQ ID NO: 316.

[0114] Examples of amino acid sequences of functional homologs of the polypeptide set forth in SEQ ID NO: 200 are provided in FIG. 12 and in the Sequence Listing. Such functional homologs include SEQ ID NO: 202, 204, 206, 208, 211, 217, 219, 223, 225, 226, 228, 230, 232, 233, 235, and 237. In some cases, a functional homolog of SEQ ID NO: 200 has an amino acid sequence with at least 50% sequence identity, e.g., 50%, 52%, 56%, 59%, 61%, 65%, 70%, 75%, 80%, 85%, 90%, 95%, 97%, 98%, or 99% sequence identity, to the amino acid sequence set forth in SEQ ID NO: 200.

[0115] Examples of amino acid sequences of functional homologs of the polypeptide set forth in SEQ ID NO: 697 are provided in FIG. 13 and in the Sequence Listing. Such functional homologs include SEQ ID NO: 699, 703, 706, 707, 709, 711, 712, 714, 718, 720, 722, 723, 726, 728, 730, 732, 733, 735, 737, 739, 740, 741, 742, 743, 745, 746, 747, 749, 751, 752, 753, 755, 757, 759, and 761. In some cases, a functional homolog of SEQ ID NO: 697 has an amino acid sequence with at least 50% sequence identity, e.g., 50%, 52%, 56%, 59%, 61%, 65%, 70%, 75%, 80%, 85%, 90%, 95%, 97%, 98%, or 99% sequence identity, to the amino acid sequence set forth in SEQ ID NO: 697.

[0116] Examples of amino acid sequences of functional homologs of the polypeptide set forth in SEQ ID NO: 239 are provided in FIG. 14 and in the Sequence Listing. Such functional homologs include SEQ ID NO: 241, 243, 245, 247, 249, 250, 251, 253, 255, 257, 259, 261, 262, 264, 266, 270, 271, 272, 273, 275, 279, 281, 282, 284, 286, 288, 290, 291, 292, 293, 294, 295, 297, 299, 301, 302, 304, 306, and 308. In some cases, a functional homolog of SEQ ID NO: 239 has an amino acid sequence with at least 50% sequence identity, e.g., 50%, 52%, 56%, 59%, 61%, 65%, 70%, 75%, 80%, 85%, 90%, 95%, 97%, 98%, or 99% sequence identity, to the amino acid sequence set forth in SEQ ID NO: 239.

[0117] Examples of amino acid sequences of functional homologs of the polypeptide set forth in SEQ ID NO: 892 are provided in FIG. 15 and in the Sequence Listing. Such functional homologs include SEQ ID NO: 894, 896, 898, 901, 903, 905, 906, 907, 909, 911, 913, 914, 915, 916, 918, and 920. In some cases, a functional homolog of SEQ ID NO: 892 has an amino acid sequence with at least 50% sequence identity, e.g., 50%, 52%, 56%, 59%, 61%, 65%, 70%, 75%, 80%, 85%, 90%, 95%, 97%, 98%, or 99% sequence identity, to the amino acid sequence set forth in SEQ ID NO: 892.

[0118] Examples of amino acid sequences of functional homologs of the polypeptide set forth in SEQ ID NO: 922 are provided in FIG. 16 and in the Sequence Listing. Such functional homologs include SEQ ID NO: 724, 806, 831, 866, 868, 869, 899, 924, 926, 928, 930, 932, 934, 936, 938, 940, 942, 944, 946, 948, 950, 952, 954, 956, 958, 960, 962, 964, 966, 968, 970, 972, 974, 975, 976, 977, 978, 979, 981, 982, 983, 985, 987, 989, 991, 993, 994, 995, and 996. In some cases, a functional homolog of SEQ ID NO: 922 has an amino acid sequence with at least 50% sequence identity, e.g., 50%, 52%, 56%, 59%, 61%, 65%, 70%, 75%, 80%, 85%, 90%, 95%, 97%, 98%, or 99% sequence identity, to the amino acid sequence set forth in SEQ ID NO: 922.

[0119] The identification of conserved regions in a salinity and/or oxidative stress tolerance-modulating polypeptide facilitates production of variants of salinity and/or oxidative stress tolerance-modulating polypeptides. Variants of salinity and/or oxidative stress tolerance-modulating polypeptides typically have 10 or fewer conservative amino acid substitutions within the primary amino acid sequence, e.g., 7 or fewer conservative amino acid substitutions, 5 or fewer conservative amino acid substitutions, or between 1 and 5 conservative substitutions. Typically seen as conservative substitutions are the replacements, one for another, among the aliphatic amino acids Ala, Val, Leu, and Ile; interchange of the hydroxyl residues Ser and Thr; exchange of the acidic residues Asp and Glu; substitution between the amide residues Asn and Gln; exchange of the basic residues Lys, His and Arg; exchange of the hydrophobic residues Leu, Ile, Val; interchange of the small residues Ala, Ser, Thr, Met and Gly; and replacements among the aromatic residues Phe, Trp, Tyr. Guidance concerning which amino acid changes are likely to be phenotypically silent under particular circumstances is found in Bowie et al., Science 247:1306-1310 (1990).

[0120] A useful variant polypeptide can be constructed based on one of the alignments set forth in FIGS. 1 thru 16. Such a polypeptide includes the conserved regions, arranged in the order depicted in the Figure from amino-terminal end to carboxy-terminal end. Such a polypeptide may also include zero, one, or more than one amino acid in positions marked by dashes. When no amino acids are present at positions marked by dashes, the length of such a polypeptide is the sum of the amino acid residues in all conserved regions. When amino acids are present at all positions marked by dashes, such a polypeptide has a length that is the sum of the amino acid residues in all conserved regions and all dashes.

[0121] C. Functional Homologues Identified by HMM

[0122] In some embodiments, useful salinity and/or oxidative stress tolerance-modulating polypeptides include those that fit a Hidden Markov Model based on the polypeptides set forth in any one of FIGS. 1-16. A Hidden Markov Model (HMM) is a statistical model of a consensus sequence for a group of functional homologs. See, Durbin et al., Biological Sequence Analysis: Probabilistic Models of Proteins and Nucleic Acids, Cambridge University Press, Cambridge, UK (1998). An HMM is generated by the program HMMER 2.3.2 with default program parameters, using the sequences of the group of functional homologs as input. The multiple sequence alignment is generated by ProbCons (Do et al., Genome Res., 15(2):330-40 (2005)) version 1.11 using a set of default parameters: -c, --consistency REPS of 2; -ir, --iterative-refinement REPS of 100; -pre, --pre-training REPS of 0. ProbCons is a public domain software program provided by Stanford University.

[0123] The default parameters for building an HMM (hmmbuild) are as follows: the default “architecture prior” (archpri) used by MAP architecture construction is 0.85, and the default cutoff threshold (idlevel) used to determine the effective sequence number is 0.62. HMMER 2.3.2 was released Oct. 3, 2003 under a GNU general public license, and is available from various sources on the World Wide Web Hmmbuild outputs the model as a text file.

[0124] The HMM for a group of functional homologs can be used to determine the likelihood that a candidate salinity and/or oxidative stress tolerance-modulating polypeptide sequence is a better fit to that particular HMM than to a null HMM generated using a group of sequences that are not structurally or functionally related. The likelihood that a subject polypeptide sequence is a better fit to an HMM than to a null HMM is indicated by the HMM bit score, a number generated when the candidate sequence is fitted to the HMM profile using the HMMER hmmsearch program. The following default parameters are used when running hmmsearch: the default E-value cutoff (E) is 10.0, the default bit score cutoff (T) is negative infinity, the default number of sequences in a database (Z) is the real number of sequences in the database, the default E-value cutoff for the per-domain ranked hit list (domE) is infinity, and the default bit score cutoff for the per-domain ranked hit list (domT) is negative infinity. A high HMM bit score indicates a greater likelihood that the subject sequence carries out one or more of the biochemical or physiological function(s) of the polypeptides used to generate the HMM. A high HMM bit score is at least 15, and often is higher.

[0125] As those of skill in the art would appreciate, the HMM scores provided in the sequence listing are merely exemplary. Since multiple sequence alignment algorithms, such as ProbCons, can only generate near-optimal results, slight variations of the model can arise due to factors such as the order in which sequences are processed for alignment. Nevertheless, HMM score variability is minor, and so the HMM scores in the sequence listing are representative of models made with the respective sequences.

[0126] The salinity and/or oxidative stress-modulating polypeptides discussed below fit the indicated HMM with an HMM bit score greater than 15 (e.g., greater than 20, 30, 40, 50, 60, 70, 80, 90, 100, 200, 300, 400, or 500). In some embodiments, the HMM bit score of a salinity and/or oxidative stress-modulating polypeptide discussed below is about 50%, 60%, 70%, 80%, 90%, or 95% of the HMM bit score of a functional homolog provided in the Sequence Listing. In some embodiments, a salinity and/or oxidative stress-modulating polypeptide discussed below fits the indicated HMM with an HMM bit score greater than 15, and has a domain indicative of a salinity and/or oxidative stress-modulating polypeptide. In some embodiments, a salinity and/or oxidative stress-modulating polypeptide discussed below fits the indicated HMM with an HMM bit score greater than 15, and has 85% or greater sequence identity (e.g., 75%, 80%, 85%, 90%, 95%, or 100% sequence identity) to an amino acid sequence shown in any one of FIGS. 1 thru 16 or to an amino acid sequence correlated in the Sequence Listing to a any one of FIGS. 1 thru 16.

[0127] In the Sequence Listing polypeptides are provided that have HMM bit scores greater than 170 when fitted to an HMM generated from the amino acid sequences set forth in FIG. 1. Such polypeptides include SEQ ID NO: 2, 4, 6, 7, and 9.

[0128] In the Sequence Listing polypeptides are provided that have HMM bit scores greater than 255 when fitted to an HMM generated from the amino acid sequences set forth in FIG. 2. Such polypeptides include SEQ ID NO: 11, 13, 15, 17, 19, 21, 23, 25, 27, 29, and 30.

[0129] In the Sequence Listing polypeptides are provided that have HMM bit scores greater than 65 or 100 when fitted to an HMM generated from the amino acid sequences set forth in FIG. 3. Such polypeptides include SEQ ID NO: 102, 103, 104, 106, 108, 110, 112, 114, 115, 116, 117, 118, 119, 120, 122, 124, 125, 127, 128, 129, 130, 132, 134, and 136.

[0130] In the Sequence Listing polypeptides are provided that have HMM bit scores greater than 175 when fitted to an HMM generated from the amino acid sequences set forth in FIG. 4. Such polypeptides include SEQ ID NO: 32, 33, 35, 37, 38, 40, 42, 44, 46, 48, 49, 51, 53, 54, 56, 58, 60, 62, 63, 64, 65, 66, 67, 68, 69, 71, 73, 75, 77, 79, 81, 83, 85, 87, 89, 91, 93, 95, 97, 98, 99, and 100.

[0131] In the Sequence Listing polypeptides are provided that have HMM bit scores greater than 1095 when fitted to an HMM generated from the amino acid sequences set forth in FIG. 5. Such polypeptides include SEQ ID NO: 138, 140, 142, 144, 146, and 147.

[0132] In the Sequence Listing polypeptides are provided that have HMM bit scores greater than 535 when fitted to an HMM generated from the amino acid sequences set forth in FIG. 6. Such polypeptides include SEQ ID NO: 149, 151, 155, 157, 159, 161, 163, 164, and 167.

[0133] In the Sequence Listing polypeptides are provided that have HMM bit scores greater than 120 when fitted to an HMM generated from the amino acid sequences set forth in FIG. 7. Such polypeptides include SEQ ID NO: 441, 442, 444, 445, 446, 447, 449, 450, 451, 452, 453, 454, 456, 457, 458, 459, 460, 461, 462, 463, 464, 465, 467, 468, 469, 470, 471, 472, 473, 474, 475, 477, 479, 480, 481, 482, 484, 486, 487, 489, 490, 491, 492, 493, 494, 496, 498, 500, 502, 503, 504, 505, 506, 507, 508, 509, 511, 512, 513, 514, 516, 517, 518, 519, 520, 522, 523, 524, 525, 527, 529, 531, 532, 533, 534, 536, 537, 538, 539, 540, 541, 543, 544, 546, 547, 549, 550, 551, 552, 553, 555, 556, 557, 559, 560, 562, 563, 564, 565, 566, 567, 569, 571, 572, 574, 576, 577, 578, 580, 582, 583, 585, 586, 588, 590, 591, 592, 593, 594, 595, 597, 598, 600, 601, 603, 605, 606, 608, 609, 610, 611, 613, 614, 615, 616, 617, 618, 620, 622, 624, 625, 626, 627, 629, 631, 633, 635, 637, 639, 640, 641, 642, 643, 644, 646, 648, 650, 651, 653, 654, 655, 657, 659, 660, 661, 662, 663, 664, 665, 666, 668, 669, 671, 673, 675, 677, 678, 680, 682, 684, 686, 688, and 690.

[0134] In the Sequence Listing polypeptides are provided that have HMM bit scores greater than 455 when fitted to an HMM generated from the amino acid sequences set forth in FIG. 8. Such polypeptides include SEQ ID NO: 172, 174, 175, 178, 179, 180, 182, 184, 186, 187, 188, 189, 191, 192, 194, 196, and 198.

[0135] In the Sequence Listing polypeptides are provided that have HMM bit scores greater than 180 when fitted to an HMM generated from the amino acid sequences set forth in FIG. 9. Such polypeptides include SEQ ID NO: 764, 765, 766, 767, 769, 770, 771, 773, 774, 775, 776, 777, 779, 780, 781, 782, 784, 785, 786, 788, 790, 792, 793, 795, 796, 797, 798, 801, 802, 804, 805, 808, 809, 810, 812, 813, 814, 815, 816, 817, 818, 819, 820, 822, 824, 825, 826, 827, 829, 832, 834, 836, 838, 840, 841, 843, 845, 846, 847, 848, 849, 850, 851, 852, 854, 855, 856, 857, 858, 860, 861, 862, 863, 864, 867, 870, 871, 872, 874, 876, 878, 880, 882, 884, 886, 888, and 890.

[0136] In the Sequence Listing polypeptides are provided that have HMM bit scores greater than 110 when fitted to an HMM generated from the amino acid sequences set forth in FIG. 10. Such polypeptides SEQ ID NO: 389, 392, 394, 396, 398, 400, 401, 402, 403, 405, 406, 407, 408, 410, 411, 412, 414, 416, 417, 418, 419, 421, 422, 424, 426, 428, 430, 431, 432, 433, 434, 436, 437, and 438.

[0137] In the Sequence Listing polypeptides are provided that have HMM bit scores greater than 75 or 280 when fitted to an HMM generated from the amino acid sequences set forth in FIG. 11. Such polypeptides include SEQ ID NO: 316, 318, 319, 320, 321, 323, 324, 331, 333, 335, 337, 339, 340, 344, 346, 348, 350, 351, 353, 355, 356, 357, 359, 361, 363, 365, 367, 369, 374, 375, 377, 378, 380, 382, 384, and 386.

[0138] In the Sequence Listing polypeptides are provided that have HMM bit scores greater than 15 or 130 when fitted to an HMM generated from the amino acid sequences set forth in FIG. 12. Such polypeptides include SEQ ID NO: 200, 202, 204, 206, 208, 211, 217, 219, 223, 225, 226, 228, 230, 232, 233, 235, and 237.

[0139] In the Sequence Listing polypeptides are provided that have HMM bit scores greater than 70 or 390 when fitted to an HMM generated from the amino acid sequences set forth in FIG. 13. Such polypeptides include SEQ ID NO: 697, 699, 703, 706, 707, 709, 711, 712, 714, 718, 720, 722, 723, 726, 728, 730, 732, 733, 735, 737, 739, 740, 741, 742, 743, 745, 746, 747, 749, 751, 752, 753, 755, 757, 759, and 761.

[0140] In the Sequence Listing polypeptides are provided that have HMM bit scores greater than 50 or 340 when fitted to an HMM generated from the amino acid sequences set forth in FIG. 14. Such polypeptides include SEQ ID NO: 239, 241, 243, 245, 247, 249, 250, 251, 253, 255, 257, 259, 261, 262, 264, 266, 270, 271, 272, 273, 275, 279, 281, 282, 284, 286, 288, 290, 291, 292, 293, 294, 295, 297, 299, 301, 302, 304, 306, and 308.

[0141] In the Sequence Listing polypeptides are provided that have HMM bit scores greater than 300 when fitted to an HMM generated from the amino acid sequences set forth in FIG. 15. Such polypeptides include SEQ ID NO: 892, 894, 896, 898, 901, 903, 905, 906, 907, 909, 911, 913, 914, 915, 916, 918, and 920.

[0142] In the Sequence Listing polypeptides are provided that have HMM bit scores greater than 25 or 550 when fitted to an HMM generated from the amino acid sequences set forth in FIG. 16. Such polypeptides include SEQ ID NO: 724, 806, 831, 866, 868, 869, 899, 922, 924, 926, 928, 930, 932, 934, 936, 938, 940, 942, 944, 946, 948, 950, 952, 954, 956, 958, 960, 962, 964, 966, 968, 970, 972, 974, 975, 976, 977, 978, 979, 981, 982, 983, 985, 987, 989, 991, 993, 994, 995, and 996.

[0143] D. Percent Identity

[0144] In some embodiments, a salinity and/or oxidative stress tolerance-modulating polypeptide has an amino acid sequence with at least 50% sequence identity, e.g., 50%, 52%, 56%, 59%, 61%, 65%, 70%, 75%, 80%, 85%, 90%, 95%, 97%, 98%, or 99% sequence identity, to one of the amino acid sequences set forth in SEQ ID NOs: 2, 11, 102, 32, 138, 149, 441, 172, 764, 389, 316, 200, 697, 239, 892, 922, or 693. Polypeptides having such a percent sequence identity often have a domain indicative of a salinity and/or oxidative stress-modulating polypeptide and/or have an HMM bit score that is greater than 15, as discussed above. Examples of amino acid sequences of salinity and/or oxidative stress tolerance-modulating polypeptides having at least 80% sequence identity to one of the amino acid sequences set forth in SEQ ID NOs: 2, 11, 102, 32, 138, 149, 441, 172, 764, 389, 316, 200, 697, 239, 892, 922, or 693 are provided in FIGS. 1-16 and in the sequence listing.

[0145] “Percent sequence identity” refers to the degree of sequence identity between any given reference sequence, e.g., SEQ ID NOs: 2, 11, 102, 32, 138, 149, 441, 172, 764, 389, 316, 200, 697, 239, 892, 922, or 693, and a candidate salinity and/or oxidative stress-modulating sequence. A candidate sequence typically has a length that is from 80 percent to 200 percent of the length of the reference sequence, e.g., 82, 85, 87, 89, 90, 93, 95, 97, 99, 100, 105, 110, 115, 120, 130, 140, 150, 160, 170, 180, 190, or 200 percent of the length of the reference sequence. A percent identity for any candidate nucleic acid or polypeptide relative to a reference nucleic acid or polypeptide can be determined as follows. A reference sequence (e.g., a nucleic acid sequence or an amino acid sequence) is aligned to one or more candidate sequences using the computer program ClustalW (version 1.83, default parameters), which allows alignments of nucleic acid or polypeptide sequences to be carried out across their entire length (global alignment). Chema et al., Nucleic Acids Res., 31(13):3497-500 (2003).

[0146] ClustalW calculates the best match between a reference and one or more candidate sequences, and aligns them so that identities, similarities and differences can be determined. Gaps of one or more residues can be inserted into a reference sequence, a candidate sequence, or both, to maximize sequence alignments. For fast pairwise alignment of nucleic acid sequences, the following default parameters are used: word size: 2; window size: 4; scoring method: percentage; number of top diagonals: 4; and gap penalty: 5. For multiple alignment of nucleic acid sequences, the following parameters are used: gap opening penalty: 10.0; gap extension penalty: 5.0; and weight transitions: yes. For fast pairwise alignment of protein sequences, the following parameters are used: word size: 1; window size: 5; scoring method: percentage; number of top diagonals: 5; gap penalty: 3. For multiple alignment of protein sequences, the following parameters are used: weight matrix: blosum; gap opening penalty: 10.0; gap extension penalty: 0.05; hydrophilic gaps: on; hydrophilic residues: Gly, Pro, Ser, Asn, Asp, Gln, Glu, Arg, and Lys; residue-specific gap penalties: on. The ClustalW output is a sequence alignment that reflects the relationship between sequences. ClustalW can be run, for example, at the Baylor College of Medicine Search Launcher site (searchlauncher.bcm.tmc.edu/multi-align/multi-align.html) and at the European Bioinformatics Institute site on the World Wide Web (ebi.ac.uk/clustalw).

[0147] To determine percent identity of a candidate nucleic acid or amino acid sequence to a reference sequence, the sequences are aligned using ClustalW, the number of identical matches in the alignment is divided by the length of the reference sequence, and the result is multiplied by 100. It is noted that the percent identity value can be rounded to the nearest tenth. For example, 78.11, 78.12, 78.13, and 78.14 are rounded down to 78.1, while 78.15, 78.16, 78.17, 78.18, and 78.19 are rounded up to 78.2.

[0148] In some cases, a salinity and/or oxidative stress tolerance-modulating polypeptide has an amino acid sequence with at least 50% sequence identity, e.g., 50%, 52%, 56%, 59%, 61%, 65%, 70%, 75%, 80%, 85%, 90%, 95%, 97%, 98%, or 99% sequence identity, to one or more of the amino acid sequence set forth in SEQ ID NO: 2, 11, 102, 32, 138, 149, 441, 172, 764, 389, 316, 200, 697, 239, 892, 922, or 693 Amino acid sequences of polypeptides having high sequence identity to the polypeptide set forth in SEQ ID NO: 2, 11, 102, 32, 138, 149, 441, 172, 764, 389, 316, 200, 697, 239, 892, 922, or 693 are provided in the Sequence Listing and in FIGS. 1-16.

[0149] E. Other Sequences

[0150] It should be appreciated that a salinity and/or oxidative stress tolerance-modulating polypeptide can include additional amino acids that are not involved in salinity and/or oxidative stress tolerance modulation, and thus such a polypeptide can be longer than would otherwise be the case. For example, a salinity and/or oxidative stress-tolerance modulating polypeptide can include a purification tag, a chloroplast transit peptide, an amyloplast transit peptide, a mitochondrial transit peptide, or a leader sequence added to the amino or carboxy terminus. In some embodiments, a salinity and/or oxidative stress-tolerance modulating polypeptide includes an amino acid sequence that functions as a reporter, e.g., a green fluorescent protein or yellow fluorescent protein.

### III. NUCLEIC ACIDS

[0151] Nucleic acids described herein include nucleic acids that are effective to modulate salinity and/or oxidative stress tolerance levels when transcribed in a plant or plant cell. Such nucleic acids include, without limitation, those that encode a salinity and/or oxidative stress tolerance-modulating polypeptide and those that can be used to inhibit expression of a salinity and/or oxidative stress tolerance-modulating polypeptide via a nucleic acid based method.

[0152] A. Nucleic Acids Encoding Salinity and/or Oxidative Stress Tolerance-Modulating Polypeptides

[0153] Nucleic acids encoding salinity and/or oxidative stress tolerance-modulating polypeptides are described herein. Examples of such nucleic acids include SEQ ID NOs: 1, 10, 101, 31, 137, 148, 440, 171, 763, 388, 315, 199, 696, 238, 891, 921, or 692, as described in more detail below.

[0154] A salinity and/or oxidative stress tolerance-modulating nucleic acid can comprise the nucleotide sequence set forth in SEQ ID NO: 1. Alternatively, a salinity and/or oxidative stress tolerance-modulating nucleic acid can be a variant of the nucleic acid having the nucleotide sequence set forth in SEQ ID NO: 1. For example, a salinity and/or oxidative stress tolerance-modulating nucleic acid can have a nucleotide sequence with at least 80% sequence identity, e.g., 81%, 85%, 90%, 95%, 97%, 98%, or 99% sequence identity, to the nucleotide sequence set forth in SEQ ID NO: 1. Examples of such nucleotide sequences can be found in the sequence listing and include SEQ ID NO: 3, 5, and 8.

[0155] A salinity and/or oxidative stress tolerance-modulating nucleic acid can comprise the nucleotide sequence set forth in SEQ ID NO: 10. Alternatively, a salinity and/or oxidative stress tolerance-modulating nucleic acid can be a variant of the nucleic acid having the nucleotide sequence set forth in SEQ ID NO: 10. For example, a salinity and/or oxidative stress tolerance-modulating nucleic acid can have a nucleotide sequence with at least 80% sequence identity, e.g., 81%, 85%, 90%, 95%, 97%, 98%, or 99% sequence identity, to the nucleotide sequence set forth in SEQ ID NO: 10. Examples of such nucleotide sequences can be found in the sequence listing and include SEQ ID NO: 12, 14, 16, 18, 20, 22, 24, 26, and 28.

[0156] A salinity and/or oxidative stress tolerance-modulating nucleic acid can comprise the nucleotide sequence set forth in SEQ ID NO: 101. Alternatively, a salinity and/or oxidative stress tolerance-modulating nucleic acid can be a variant of the nucleic acid having the nucleotide sequence set forth in SEQ ID NO: 101. For example, a salinity and/or oxidative stress tolerance-modulating nucleic acid can have a nucleotide sequence with at least 80% sequence identity, e.g., 81%, 85%, 90%, 95%, 97%, 98%, or 99% sequence identity, to the nucleotide sequence set forth in SEQ ID NO: 101. Examples of such nucleotide sequences can be found in the sequence listing and include SEQ ID NO: 105, 107, 109, 111, 113, 121, 123, 126, 131, 133, and 135.

[0157] A salinity and/or oxidative stress tolerance-modulating nucleic acid can comprise the nucleotide sequence set forth in SEQ ID NO: 31. Alternatively, a salinity and/or oxidative stress tolerance-modulating nucleic acid can be a variant of the nucleic acid having the nucleotide sequence set forth in SEQ ID NO: 31. For example, a salinity and/or oxidative stress tolerance-modulating nucleic acid can have a nucleotide sequence with at least 80% sequence identity, e.g., 81%, 85%, 90%, 95%, 97%, 98%, or 99% sequence identity, to the nucleotide sequence set forth in SEQ ID NO: 31. Examples of such nucleotide sequences can be found in the sequence listing and include SEQ ID NO: 34, 36, 39, 41, 43, 45, 47, 50, 52, 55, 57, 59, 61, 70, 72, 74, 76, 78, 80, 82, 84, 86, 88, 90, 92, 94, and 96.

[0158] A salinity and/or oxidative stress tolerance-modulating nucleic acid can comprise the nucleotide sequence set forth in SEQ ID NO: 137. Alternatively, a salinity and/or oxidative stress tolerance-modulating nucleic acid can be a variant of the nucleic acid having the nucleotide sequence set forth in SEQ ID NO: 137. For example, a salinity and/or oxidative stress tolerance-modulating nucleic acid can have a nucleotide sequence with at least 80% sequence identity, e.g., 81%, 85%, 90%, 95%, 97%, 98%, or 99% sequence identity, to the nucleotide sequence set forth in SEQ ID NO: 137. Examples of such nucleotide sequences can be found in the sequence listing and include SEQ ID NO: 137, 139, 141, 143, and 145.

[0159] A salinity and/or oxidative stress tolerance-modulating nucleic acid can comprise the nucleotide sequence set forth in SEQ ID NO: 148. Alternatively, a salinity and/or oxidative stress tolerance-modulating nucleic acid can be a variant of the nucleic acid having the nucleotide sequence set forth in SEQ ID NO: 148. For example, a salinity and/or oxidative stress tolerance-modulating nucleic acid can have a nucleotide sequence with at least 80% sequence identity, e.g., 81%, 85%, 90%, 95%, 97%, 98%, or 99% sequence identity, to the nucleotide sequence set forth in SEQ ID NO: 148. Examples of such nucleotide sequences can be found in the sequence listing and include SEQ ID NO: 148, 150, 152, 156, 158, 160, 166, and 168.

[0160] A salinity and/or oxidative stress tolerance-modulating nucleic acid can comprise the nucleotide sequence set forth in SEQ ID NO: 440. Alternatively, a salinity and/or oxidative stress tolerance-modulating nucleic acid can be a variant of the nucleic acid having the nucleotide sequence set forth in SEQ ID NO: 440. For example, a salinity and/or oxidative stress tolerance-modulating nucleic acid can have a nucleotide sequence with at least 80% sequence identity, e.g., 81%, 85%, 90%, 95%, 97%, 98%, or 99% sequence identity, to the nucleotide sequence set forth in SEQ ID NO: 440. Examples of such nucleotide sequences can be found in the sequence listing and include SEQ ID NO: 443, 448, 455, 466, 476, 478, 483, 485, 488, 495, 497, 499, 501, 510, 515, 521, 526, 528, 530, 535, 542, 545, 548, 554, 558, 561, 568, 570, 573, 575, 579, 581, 584, 587, 589, 596, 599, 602, 604, 607, 612, 619, 621, 623, 628, 630, 632, 634, 636, 638, 645, 647, 649, 652, 656, 658, 667, 670, 672, 674, 676, 679, 681, 683, 685, 687, and 689.

[0161] A salinity and/or oxidative stress tolerance-modulating nucleic acid can comprise the nucleotide sequence set forth in SEQ ID NO: 171. Alternatively, a salinity and/or oxidative stress tolerance-modulating nucleic acid can be a variant of the nucleic acid having the nucleotide sequence set forth in SEQ ID NO: 171. For example, a salinity and/or oxidative stress tolerance-modulating nucleic acid can have a nucleotide sequence with at least 80% sequence identity, e.g., 81%, 85%, 90%, 95%, 97%, 98%, or 99% sequence identity, to the nucleotide sequence set forth in SEQ ID NO: 171. Examples of such nucleotide sequences can be found in the sequence listing and include SEQ ID NO: 181, 183, 185, 190, 193, 195, and 197.

[0162] A salinity and/or oxidative stress tolerance-modulating nucleic acid can comprise the nucleotide sequence set forth in SEQ ID NO: 763. Alternatively, a salinity and/or oxidative stress tolerance-modulating nucleic acid can be a variant of the nucleic acid having the nucleotide sequence set forth in SEQ ID NO: 763. For example, a salinity and/or oxidative stress tolerance-modulating nucleic acid can have a nucleotide sequence with at least 80% sequence identity, e.g., 81%, 85%, 90%, 95%, 97%, 98%, or 99% sequence identity, to the nucleotide sequence set forth in SEQ ID NO: 763. Examples of such nucleotide sequences can be found in the sequence listing and include SEQ ID NO: 768, 772, 778, 783, 787, 789, 791, 794, 799, 800, 803, 807, 811, 821, 823, 828, 830, 833, 835, 837, 839, 842, 844, 853, 859, 873, 875, 877, 879, 881, 883, 885, 887, and 889.

[0163] A salinity and/or oxidative stress tolerance-modulating nucleic acid can comprise the nucleotide sequence set forth in SEQ ID NO: 388. Alternatively, a salinity and/or oxidative stress tolerance-modulating nucleic acid can be a variant of the nucleic acid having the nucleotide sequence set forth in SEQ ID NO: 388. For example, a salinity and/or oxidative stress tolerance-modulating nucleic acid can have a nucleotide sequence with at least 80% sequence identity, e.g., 81%, 85%, 90%, 95%, 97%, 98%, or 99% sequence identity, to the nucleotide sequence set forth in SEQ ID NO: 388. Examples of such nucleotide sequences can be found in the sequence listing and include SEQ ID NO: 390, 391, 393, 395, 397, 399, 404, 409, 413, 415, 420, 423, 425, 427, 429, and 435.

[0164] A salinity and/or oxidative stress tolerance-modulating nucleic acid can comprise the nucleotide sequence set forth in SEQ ID NO: 315. Alternatively, a salinity and/or oxidative stress tolerance-modulating nucleic acid can be a variant of the nucleic acid having the nucleotide sequence set forth in SEQ ID NO: 315. For example, a salinity and/or oxidative stress tolerance-modulating nucleic acid can have a nucleotide sequence with at least 80% sequence identity, e.g., 81%, 85%, 90%, 95%, 97%, 98%, or 99% sequence identity, to the nucleotide sequence set forth in SEQ ID NO: 315. Examples of such nucleotide sequences can be found in the sequence listing and include SEQ ID NO: 317, 322, 330, 332, 334, 336, 338, 343, 345, 347, 349, 352, 354, 358, 360, 362, 364, 366, 368, 376, 379, 381, 383, and 385.

[0165] A salinity and/or oxidative stress tolerance-modulating nucleic acid can comprise the nucleotide sequence set forth in SEQ ID NO: 199. Alternatively, a salinity and/or oxidative stress tolerance-modulating nucleic acid can be a variant of the nucleic acid having the nucleotide sequence set forth in SEQ ID NO: 199. For example, a salinity and/or oxidative stress tolerance-modulating nucleic acid can have a nucleotide sequence with at least 80% sequence identity, e.g., 81%, 85%, 90%, 95%, 97%, 98%, or 99% sequence identity, to the nucleotide sequence set forth in SEQ ID NO: 199. Examples of such nucleotide sequences can be found in the sequence listing and include SEQ ID NO: 207, 205, 203, 234, 236, 216, 210, 218, 231, 201, 229, 222, 227, and 224.

[0166] A salinity and/or oxidative stress tolerance-modulating nucleic acid can comprise the nucleotide sequence set forth in SEQ ID NO: 696. Alternatively, a salinity and/or oxidative stress tolerance-modulating nucleic acid can be a variant of the nucleic acid having the nucleotide sequence set forth in SEQ ID NO: 696. For example, a salinity and/or oxidative stress tolerance-modulating nucleic acid can have a nucleotide sequence with at least 80% sequence identity, e.g., 81%, 85%, 90%, 95%, 97%, 98%, or 99% sequence identity, to the nucleotide sequence set forth in SEQ ID NO: 696. Examples of such nucleotide sequences can be found in the sequence listing and include SEQ ID NO: 734, 748, 738, 731, 710, 736, 729, 760, 756, 758, 754, 717, 698, 713, 727, 744, 702, 750, 725, 721, 719, and 708.

[0167] A salinity and/or oxidative stress tolerance-modulating nucleic acid can comprise the nucleotide sequence set forth in SEQ ID NO: 238. Alternatively, a salinity and/or oxidative stress tolerance-modulating nucleic acid can be a variant of the nucleic acid having the nucleotide sequence set forth in SEQ ID NO: 238. For example, a salinity and/or oxidative stress tolerance-modulating nucleic acid can have a nucleotide sequence with at least 80% sequence identity, e.g., 81%, 85%, 90%, 95%, 97%, 98%, or 99% sequence identity, to the nucleotide sequence set forth in SEQ ID NO: 238. Examples of such nucleotide sequences can be found in the sequence listing and include SEQ ID NO: 283, 307, 269, 256, 260, 278, 248, 252, 254, 296, 242, 274, 244, 280, 285, 300, 303, 305, 298, 240, 263, 258, 287, 289, 265, and 246.

[0168] A salinity and/or oxidative stress tolerance-modulating nucleic acid can comprise the nucleotide sequence set forth in SEQ ID NO: 891. Alternatively, a salinity and/or oxidative stress tolerance-modulating nucleic acid can be a variant of the nucleic acid having the nucleotide sequence set forth in SEQ ID NO: 891. For example, a salinity and/or oxidative stress tolerance-modulating nucleic acid can have a nucleotide sequence with at least 80% sequence identity, e.g., 81%, 85%, 90%, 95%, 97%, 98%, or 99% sequence identity, to the nucleotide sequence set forth in SEQ ID NO: 891. Examples of such nucleotide sequences can be found in the sequence listing and include SEQ ID NO: 893, 895, 897, 900, 902, 904, 908, 910, 912, 917, and 919.

[0169] A salinity and/or oxidative stress tolerance-modulating nucleic acid can comprise the nucleotide sequence set forth in SEQ ID NO: 921. Alternatively, a salinity and/or oxidative stress tolerance-modulating nucleic acid can be a variant of the nucleic acid having the nucleotide sequence set forth in SEQ ID NO: 921. For example, a salinity and/or oxidative stress tolerance-modulating nucleic acid can have a nucleotide sequence with at least 80% sequence identity, e.g., 81%, 85%, 90%, 95%, 97%, 98%, or 99% sequence identity, to the nucleotide sequence set forth in SEQ ID NO: 921. Examples of such nucleotide sequences can be found in the sequence listing and include SEQ ID NO: 830, 923, 925, 927, 929, 931, 933, 935, 937, 939, 941, 943, 945, 947, 949, 951, 953, 955, 957, 959, 961, 963, 965, 967, 969, 971, 973, 980, 984, 986, 988, 990, and 992.

[0170] Isolated nucleic acid molecules can be produced by standard techniques. For example, polymerase chain reaction (PCR) techniques can be used to obtain an isolated nucleic acid containing a nucleotide sequence described herein. PCR can be used to amplify specific sequences from DNA as well as RNA, including sequences from total genomic DNA or total cellular RNA. Various PCR methods are described, for example, in PCR Primer: A Laboratory Manual, Dieffenbach and Dveksler, eds., Cold Spring Harbor Laboratory Press, 1995. Generally, sequence information from the ends of the region of interest or beyond is employed to design oligonucleotide primers that are identical or similar in sequence to opposite strands of the template to be amplified. Various PCR strategies also are available by which site-specific nucleotide sequence modifications can be introduced into a template nucleic acid. Isolated nucleic acids also can be chemically synthesized, either as a single nucleic acid molecule (e.g., using automated DNA synthesis in the 3′ to 5′ direction using phosphoramidite technology) or as a series of oligonucleotides. For example, one or more pairs of long oligonucleotides (e.g., >100 nucleotides) can be synthesized that contain the desired sequence, with each pair containing a short segment of complementarity (e.g., about 15 nucleotides) such that a duplex is formed when the oligonucleotide pair is annealed. DNA polymerase is used to extend the oligonucleotides, resulting in a single, double-stranded nucleic acid molecule per oligonucleotide pair, which then can be ligated into a vector. Isolated nucleic acids of the invention also can be obtained by mutagenesis of, e.g., a naturally occurring DNA.

[0171] B. Use of Nucleic Acids to Modulate Expression of Polypeptides

[0172] i. Expression of a Salinity and/or Oxidative Stress Tolerance-Modulating Polypeptide

[0173] A nucleic acid encoding one of the salinity and/or oxidative stress tolerance-modulating polypeptides described herein can be used to express the polypeptide in a plant species of interest, typically by transforming a plant cell with a nucleic acid having the coding sequence for the polypeptide operably linked in sense orientation to one or more regulatory regions. It will be appreciated that because of the degeneracy of the genetic code, a number of nucleic acids can encode a particular salinity and/or oxidative stress tolerance-modulating polypeptide; i.e., for many amino acids, there is more than one nucleotide triplet that serves as the codon for the amino acid. Thus, codons in the coding sequence for a given salinity and/or oxidative stress tolerance-modulating polypeptide can be modified such that optimal expression in a particular plant species is obtained, using appropriate codon bias tables for that species.

[0174] In some cases, expression of a salinity and/or oxidative stress tolerance-modulating polypeptide inhibits one or more functions of an endogenous polypeptide. For example, a nucleic acid that encodes a dominant negative polypeptide can be used to inhibit protein function. A dominant negative polypeptide typically is mutated or truncated relative to an endogenous wild type polypeptide, and its presence in a cell inhibits one or more functions of the wild type polypeptide in that cell, i.e., the dominant negative polypeptide is genetically dominant and confers a loss of function. The mechanism by which a dominant negative polypeptide confers such a phenotype can vary but often involves a protein-protein interaction or a protein-DNA interaction. For example, a dominant negative polypeptide can be an enzyme that is truncated relative to a native wild type enzyme, such that the truncated polypeptide retains domains involved in binding a first protein but lacks domains involved in binding a second protein. The truncated polypeptide is thus unable to properly modulate the activity of the second protein. See, e.g., US 2007/0056058. As another example, a point mutation that results in a non-conservative amino acid substitution in a catalytic domain can result in a dominant negative polypeptide. See, e.g., US 2005/032221. As another example, a dominant negative polypeptide can be a transcription factor that is truncated relative to a native wild type transcription factor, such that the truncated polypeptide retains the DNA binding domain(s) but lacks the activation domain(s). Such a truncated polypeptide can inhibit the wild type transcription factor from binding DNA, thereby inhibiting transcription activation.

[0175] ii Inhibition of Expression of a salinity and/or oxidative stress tolerance-Modulating Polypeptide

[0176] Polynucleotides and recombinant constructs described herein can be used to inhibit expression of a salinity and/or oxidative stress tolerance-modulating polypeptide in a plant species of interest. See, e.g., Matzke and Birchler, Nature Reviews Genetics 6:24-35 (2005); Akashi et al., Nature Reviews Mol. Cell Biology 6:413-422 (2005); Mittal, Nature Reviews Genetics 5:355-365 (2004); Dorsett and Tuschl, Nature Reviews Drug Discovery 3: 318-329 (2004); and Nature Reviews RNA interference collection, October 2005 at nature.com/reviews/focus/mai. Typically, at least a fragment of a nucleic acid encoding salinity and/or oxidative stress tolerance-modulating polypeptides and/or its complement is expressed. A fragment is typically at least 20 nucleotides long, as needed for the methods noted below. A number of nucleic acid based methods, including antisense RNA, ribozyme directed RNA cleavage, post-transcriptional gene silencing (PTGS), e.g., RNA interference (RNAi), and transcriptional gene silencing (TGS) are known to inhibit gene expression in plants. Antisense technology is one well-known method. In this method, a nucleic acid segment from a gene to be repressed is cloned and operably linked to a regulatory region and a transcription termination sequence so that the antisense strand of RNA is transcribed. The recombinant construct is then transformed into plants, as described herein, and the antisense strand of RNA is produced. The nucleic acid segment need not be the entire sequence of the gene to be repressed, but typically will be substantially complementary to at least a portion of the sense strand of the gene to be repressed. Generally, higher homology can be used to compensate for the use of a shorter sequence. Typically, a sequence of at least 30 nucleotides is used, e.g., at least 40, 50, 80, 100, 200, 500 nucleotides or more.

[0177] In another method, a nucleic acid can be transcribed into a ribozyme, or catalytic RNA, that affects expression of an mRNA. See, U.S. Pat. No. 6,423,885. Ribozymes can be designed to specifically pair with virtually any target RNA and cleave the phosphodiester backbone at a specific location, thereby functionally inactivating the target RNA. Heterologous nucleic acids can encode ribozymes designed to cleave particular mRNA transcripts, thus preventing expression of a polypeptide. Hammerhead ribozymes are useful for destroying particular mRNAs, although various ribozymes that cleave mRNA at site-specific recognition sequences can be used. Hammerhead ribozymes cleave mRNAs at locations dictated by flanking regions that form complementary base pairs with the target mRNA. The sole requirement is that the target RNA contains a 5′-UG-3′ nucleotide sequence. The construction and production of hammerhead ribozymes is known in the art. See, for example, U.S. Pat. No. 5,254,678 and WO 02/46449 and references cited therein. Hammerhead ribozyme sequences can be embedded in a stable RNA such as a transfer RNA (tRNA) to increase cleavage efficiency in vivo. Perriman et al., Proc. Natl. Acad. Sci. USA, 92(13):6175-6179 (1995); de Feyter and Gaudron, Methods in Molecular Biology, Vol. 74, Chapter 43, “Expressing Ribozymes in Plants”, Edited by Turner, P. C., Humana Press Inc., Totowa, N.J. RNA endoribonucleases which have been described, such as the one that occurs naturally in Tetrahymena thermophila, can be useful. See, for example, U.S. Pat. Nos. 4,987,071 and 6,423,885.

[0178] PTGS, e.g., RNAi, can also be used to inhibit the expression of a gene. For example, a construct can be prepared that includes a sequence that is transcribed into an RNA that can anneal to itself, e.g., a double stranded RNA having a stem-loop structure. In some embodiments, one strand of the stem portion of a double stranded RNA comprises a sequence that is similar or identical to the sense coding sequence of a salinity and/or oxidative stress tolerance-modulating polypeptide, and that is from about 10 nucleotides to about 2,500 nucleotides in length. The length of the sequence that is similar or identical to the sense coding sequence can be from 10 nucleotides to 500 nucleotides, from 15 nucleotides to 300 nucleotides, from 20 nucleotides to 100 nucleotides, or from 25 nucleotides to 100 nucleotides. The other strand of the stem portion of a double stranded RNA comprises a sequence that is similar or identical to the antisense strand of the coding sequence of the salinity and/or oxidative stress tolerance-modulating polypeptide, and can have a length that is shorter, the same as, or longer than the corresponding length of the sense sequence. In some cases, one strand of the stem portion of a double stranded RNA comprises a sequence that is similar or identical to the 3′ or 5′ untranslated region of an mRNA encoding a salinity and/or oxidative stress tolerance-modulating polypeptide, and the other strand of the stem portion of the double stranded RNA comprises a sequence that is similar or identical to the sequence that is complementary to the 3′ or 5′ untranslated region, respectively, of the mRNA encoding the salinity and/or oxidative stress tolerance-modulating polypeptide. In other embodiments, one strand of the stem portion of a double stranded RNA comprises a sequence that is similar or identical to the sequence of an intron in the pre-mRNA encoding a salinity and/or oxidative stress tolerance-modulating polypeptide, and the other strand of the stem portion comprises a sequence that is similar or identical to the sequence that is complementary to the sequence of the intron in the pre-mRNA. The loop portion of a double stranded RNA can be from 3 nucleotides to 5,000 nucleotides, e.g., from 3 nucleotides to 25 nucleotides, from 15 nucleotides to 1,000 nucleotides, from 20 nucleotides to 500 nucleotides, or from 25 nucleotides to 200 nucleotides. The loop portion of the RNA can include an intron. A double stranded RNA can have zero, one, two, three, four, five, six, seven, eight, nine, ten, or more stem-loop structures. A construct including a sequence that is operably linked to a regulatory region and a transcription termination sequence, and that is transcribed into an RNA that can form a double stranded RNA, is transformed into plants as described herein. Methods for using RNAi to inhibit the expression of a gene are known to those of skill in the art. See, e.g., U.S. Pat. Nos. 5,034,323; 6,326,527; 6,452,067; 6,573,099; 6,753,139; and 6,777,588. See also WO 97/01952; WO 98/53083; WO 99/32619; WO 98/36083; and U.S. Patent Publications 20030175965, 20030175783, 20040214330, and 20030180945.

[0179] Constructs containing regulatory regions operably linked to nucleic acid molecules in sense orientation can also be used to inhibit the expression of a gene. The transcription product can be similar or identical to the sense coding sequence of a salinity and/or oxidative stress tolerance-modulating polypeptide. The transcription product can also be unpolyadenylated, lack a 5′ cap structure, or contain an unspliceable intron. Methods of inhibiting gene expression using a full-length cDNA as well as a partial cDNA sequence are known in the art. See, e.g., U.S. Pat. No. 5,231,020.

[0180] In some embodiments, a construct containing a nucleic acid having at least one strand that is a template for both sense and antisense sequences that are complementary to each other is used to inhibit the expression of a gene. The sense and antisense sequences can be part of a larger nucleic acid molecule or can be part of separate nucleic acid molecules having sequences that are not complementary. The sense or antisense sequence can be a sequence that is identical or complementary to the sequence of an mRNA, the 3′ or 5′ untranslated region of an mRNA, or an intron in a pre-mRNA encoding a salinity and/or oxidative stress tolerance-modulating polypeptide. In some embodiments, the sense or antisense sequence is identical or complementary to a sequence of the regulatory region that drives transcription of the gene encoding a salinity and/or oxidative stress tolerance-modulating polypeptide. In each case, the sense sequence is the sequence that is complementary to the antisense sequence.

[0181] The sense and antisense sequences can be any length greater than about 12 nucleotides (e.g., 13, 14, 15, 16, 17, 18, 19, 20, 21, 22, 23, 24, 25, 26, 27, 28, 29, 30, or more nucleotides). For example, an antisense sequence can be 21 or 22 nucleotides in length. Typically, the sense and antisense sequences range in length from about 15 nucleotides to about 30 nucleotides, e.g., from about 18 nucleotides to about 28 nucleotides, or from about 21 nucleotides to about 25 nucleotides.

[0182] In some embodiments, an antisense sequence is a sequence complementary to an mRNA sequence encoding a salinity and/or oxidative stress tolerance-modulating polypeptide described herein. The sense sequence complementary to the antisense sequence can be a sequence present within the mRNA of the salinity and/or oxidative stress tolerance-modulating polypeptide. Typically, sense and antisense sequences are designed to correspond to a 15-30 nucleotide sequence of a target mRNA such that the level of that target mRNA is reduced.

[0183] In some embodiments, a construct containing a nucleic acid having at least one strand that is a template for more than one sense sequence (e.g., 2, 3, 4, 5, 6, 7, 8, 9, 10 or more sense sequences) can be used to inhibit the expression of a gene. Likewise, a construct containing a nucleic acid having at least one strand that is a template for more than one antisense sequence (e.g., 2, 3, 4, 5, 6, 7, 8, 9, 10 or more antisense sequences) can be used to inhibit the expression of a gene. For example, a construct can contain a nucleic acid having at least one strand that is a template for two sense sequences and two antisense sequences. The multiple sense sequences can be identical or different, and the multiple antisense sequences can be identical or different. For example, a construct can have a nucleic acid having one strand that is a template for two identical sense sequences and two identical antisense sequences that are complementary to the two identical sense sequences. Alternatively, an isolated nucleic acid can have one strand that is a template for (1) two identical sense sequences 20 nucleotides in length, (2) one antisense sequence that is complementary to the two identical sense sequences 20 nucleotides in length, (3) a sense sequence 30 nucleotides in length, and (4) three identical antisense sequences that are complementary to the sense sequence 30 nucleotides in length. The constructs provided herein can be designed to have any arrangement of sense and antisense sequences. For example, two identical sense sequences can be followed by two identical antisense sequences or can be positioned between two identical antisense sequences.

[0184] A nucleic acid having at least one strand that is a template for one or more sense and/or antisense sequences can be operably linked to a regulatory region to drive transcription of an RNA molecule containing the sense and/or antisense sequence(s). In addition, such a nucleic acid can be operably linked to a transcription terminator sequence, such as the terminator of the nopaline synthase (nos) gene. In some cases, two regulatory regions can direct transcription of two transcripts: one from the top strand, and one from the bottom strand. See, for example, Yan et al., Plant Physiol., 141:1508-1518 (2006). The two regulatory regions can be the same or different. The two transcripts can form double-stranded RNA molecules that induce degradation of the target RNA. In some cases, a nucleic acid can be positioned within a T-DNA or plant-derived transfer DNA (P-DNA) such that the left and right T-DNA border sequences, or the left and right border-like sequences of the P-DNA, flank or are on either side of the nucleic acid. See, US 2006/0265788. The nucleic acid sequence between the two regulatory regions can be from about 15 to about 300 nucleotides in length. In some embodiments, the nucleic acid sequence between the two regulatory regions is from about 15 to about 200 nucleotides in length, from about 15 to about 100 nucleotides in length, from about 15 to about 50 nucleotides in length, from about 18 to about 50 nucleotides in length, from about 18 to about 40 nucleotides in length, from about 18 to about 30 nucleotides in length, or from about 18 to about 25 nucleotides in length.

[0185] In some nucleic-acid based methods for inhibition of gene expression in plants, a suitable nucleic acid can be a nucleic acid analog. Nucleic acid analogs can be modified at the base moiety, sugar moiety, or phosphate backbone to improve, for example, stability, hybridization, or solubility of the nucleic acid. Modifications at the base moiety include deoxyuridine for deoxythymidine, and 5-methyl-2′-deoxycytidine and 5-bromo-2′-deoxycytidine for deoxycytidine. Modifications of the sugar moiety include modification of the 2′ hydroxyl of the ribose sugar to form 2′-O-methyl or 2′-O-allyl sugars. The deoxyribose phosphate backbone can be modified to produce morpholino nucleic acids, in which each base moiety is linked to a six-membered morpholino ring, or peptide nucleic acids, in which the deoxyphosphate backbone is replaced by a pseudopeptide backbone and the four bases are retained. See, for example, Summerton and Weller, 1997, Antisense Nucleic Acid Drug Dev., 7:187-195; Hyrup et al., Bioorgan. Med. Chem., 4:5-23 (1996). In addition, the deoxyphosphate backbone can be replaced with, for example, a phosphorothioate or phosphorodithioate backbone, a phosphoroamidite, or an alkyl phosphotriester backbone.

[0186] C. Constructs/Vectors

[0187] Recombinant constructs provided herein can be used to transform plants or plant cells in order to modulate salinity and/or oxidative stress tolerance levels. A recombinant nucleic acid construct can comprise a nucleic acid encoding a salinity and/or oxidative stress tolerance-modulating polypeptide as described herein, operably linked to a regulatory region suitable for expressing the salinity and/or oxidative stress tolerance-modulating polypeptide in the plant or cell. Thus, a nucleic acid can comprise a coding sequence that encodes any of the salinity and/or oxidative stress tolerance-modulating polypeptides as set forth in SEQ ID NOs: 2, 11, 102, 32, 138, 149, 441, 172, 764, 389, 316, 200, 697, 239, 892, 922, 693 or homologs thereof, including, but not limited to, any of the amino acid sequences set forth in the sequence listing. Examples of nucleic acids encoding salinity and/or oxidative stress tolerance-modulating polypeptides are set forth in SEQ ID NOs: 1, 3, 5, 8, 10, 12, 14, 16, 18, 20, 22, 24, 26, 28, 31, 34, 36, 39, 41, 43, 45, 47, 50, 52, 55, 7, 59, 61, 70, 72, 74, 76, 78, 80, 82, 84, 86, 88, 90, 92, 94, 96, 101, 105, 107, 109, 111, 113, 121, 123, 126, 131, 133, 135, 137, 139, 141, 145, 148, 150, 152, 156, 158, 160, 166, 168, 170, 171, 173, 177, 181, 183, 185, 190, 193, 195, 197, 199, 201, 203, 205, 207, 210, 216, 218, 222, 224, 227, 229, 231, 234, 236, 238, 240, 242, 244, 246, 248, 252, 254, 256, 258, 260, 263, 265, 269, 274, 278, 280, 283, 285, 287, 289, 296, 298, 300, 303, 305, 307, 315, 317, 322, 330, 332, 334, 336, 338, 343, 345, 347, 349, 352, 354, 358, 360, 362, 364, 366, 368, 376, 379, 381, 383, 385, 387, 388, 391, 393, 395, 397, 399, 404, 409, 413, 415, 420, 423, 425, 427, 429, 435, 439, 440, 443, 448, 455, 466, 476, 478, 483, 485, 488, 495, 497, 499, 501, 510, 515, 521, 526, 528, 530, 535, 542, 545, 548, 554, 558, 561, 568, 570, 573, 575, 579, 581, 584, 587, 589, 596, 599, 602, 604, 607, 612, 619, 621, 623, 628, 630, 632, 634, 636, 638, 645, 647, 649, 652, 656, 658, 667, 670, 672, 674, 676, 679, 681, 683, 685, 687, 689, 691, 692, 695, 696, 698, 702, 708, 710, 713, 717, 719, 721, 725, 727, 729, 731, 734, 736, 738, 744, 748, 750, 754, 756, 758, 760, 762, 763, 768, 772, 778, 783, 787, 789, 791, 794, 799, 800, 803, 807, 811, 821, 823, 828, 830, 833, 835, 837, 839, 842, 844, 853, 859, 865, 873, 875, 877, 879, 881, 883, 885, 887, 889, 891, 893, 895, 897, 900, 902, 904, 908, 910, 912, 917, 919, 921, 923, 925, 927, 929, 931, 933, 935, 937, 939, 941, 943, 945, 947, 949, 951, 953, 955, 957, 959, 961, 963, 965, 967, 969, 971, 973, 980, 984, 986, 988, 990, or 992.

[0188] The salinity and/or oxidative stress tolerance-modulating polypeptide encoded by a recombinant nucleic acid can be a native salinity and/or oxidative stress tolerance-modulating polypeptide, or can be heterologous to the cell. In some cases, the recombinant construct contains a nucleic acid that inhibits expression of a salinity and/or oxidative stress tolerance-modulating polypeptide, operably linked to a regulatory region. Examples of suitable regulatory regions are described in the section entitled “Regulatory Regions.”

[0189] Vectors containing recombinant nucleic acid constructs such as those described herein also are provided. Suitable vector backbones include, for example, those routinely used in the art such as plasmids, viruses, artificial chromosomes, BACs, YACs, or PACs. Suitable expression vectors include, without limitation, plasmids and viral vectors derived from, for example, bacteriophage, baculoviruses, and retroviruses. Numerous vectors and expression systems are commercially available from such corporations as Novagen (Madison, Wis.), Clontech (Palo Alto, Calif.), Stratagene (La Jolla, Calif.), and Invitrogen/Life Technologies (Carlsbad, Calif.).

[0190] The vectors provided herein also can include, for example, origins of replication, scaffold attachment regions (SARs), and/or markers. A marker gene can confer a selectable phenotype on a plant cell. For example, a marker can confer biocide resistance, such as resistance to an antibiotic (e.g., kanamycin, G418, bleomycin, or hygromycin), or an herbicide (e.g., glyphosate, chlorsulfuron or phosphinothricin). In addition, an expression vector can include a tag sequence designed to facilitate manipulation or detection (e.g., purification or localization) of the expressed polypeptide. Tag sequences, such as luciferase, β-glucuronidase (GUS), green fluorescent protein (GFP), glutathione S-transferase (GST), polyhistidine, c-myc, hemagglutinin, or Flag™ tag (Kodak, New Haven, Conn.) sequences typically are expressed as a fusion with the encoded polypeptide. Such tags can be inserted anywhere within the polypeptide, including at either the carboxyl or amino terminus.

[0191] D. Regulatory Regions

[0192] The choice of regulatory regions to be included in a recombinant construct depends upon several factors, including, but not limited to, efficiency, selectability, inducibility, desired expression level, and cell- or tissue-preferential expression. It is a routine matter for one of skill in the art to modulate the expression of a coding sequence by appropriately selecting and positioning regulatory regions relative to the coding sequence. Transcription of a nucleic acid can be modulated in a similar manner.

[0193] Some suitable promoters initiate transcription only, or predominantly, in certain cell types. The choice of regulatory regions to be included in a recombinant construct depends upon several factors, including, but not limited to, efficiency, selectability, inducibility, desired expression level, and cell- or tissue-preferential expression. It is a routine matter for one of skill in the art to modulate the expression of a coding sequence by appropriately selecting and positioning regulatory regions relative to the coding sequence. Transcription of a nucleic acid can be modulated in a similar manner

[0194] Some suitable regulatory regions initiate transcription only, or predominantly, in certain cell types. Methods for identifying and characterizing regulatory regions in plant genomic DNA are known, including, for example, those described in the following references: Jordano et al., Plant Cell, 1:855-866 (1989); Bustos et al., Plant Cell, 1:839-854 (1989); Green et al., EMBO J., 7:4035-4044 (1988); Meier et al., Plant Cell, 3:309-316 (1991); and Zhang et al., Plant Physiology, 110:1069-1079 (1996).

[0195] Examples of various classes of regulatory regions are described below. Some of the regulatory regions indicated below as well as additional regulatory regions are described in more detail in U.S. Patent Application Ser. Nos. 60/505,689; 60/518,075; 60/544,771; 60/558,869; 60/583,691; 60/619,181; 60/637,140; 60/757,544; 60/776,307; 10/957,569; 11/058,689; 11/172,703; 11/208,308; 11/274,890; 60/583,609; 60/612,891; 11/097,589; 11/233,726; 11/408,791; 11/414,142; 10/950,321; 11/360,017; PCT/US05/011105; PCT/US05/23639; PCT/US05/034308; PCT/US05/034343; and PCT/US06/038236; PCT/US06/040572; and PCT/US07/62762, each of which is hereby expressly incorporated by reference in its entirety.

[0196] Additional examples of regulatory regions are described in U.S. Application Ser. No. 61/025,697, which is hereby expressly incorporated by reference in its entirety.

[0197] For example, the sequences of regulatory regions p326, YP0144, YP0190, p13879, YP0050, p32449, 21876, YP0158, YP0214, YP0380, PT0848, PT0633, YP0128, YP0275, PT0660, PT0683, PT0758, PT0613, PT0672, PT0688, PT0837, YP0092, PT0676, PT0708, YP0396, YP0007, YP0111, YP0103, YP0028, YP0121, YP0008, YP0039, YP0115, YP0119, YP0120, YP0374, YP0101, YP0102, YP0110, YP0117, YP0137, YP0285, YP0212, YP0097, YP0107, YP0088, YP0143, YP0156, PT0650, PT0695, PT0723, PT0838, PT0879, PT0740, PT0535, PT0668, PT0886, PT0585, YP0381, YP0337, PT0710, YP0356, YP0385, YP0384, YP0286, YP0377, PD1367, PT0863, PT0829, PT0665, PT0678, YP0086, YP0188, YP0263, PT0743 and YP0096 are set forth in the sequence listing of PCT/US06/040572; the sequence of regulatory region PT0625 is set forth in the sequence listing of PCT/US05/034343; the sequences of regulatory regions PT0623, YP0388, YP0087, YP0093, YP0108, YP0022 and YP0080 are set forth in the sequence listing of U.S. patent application Ser. No. 11/172,703; the sequence of regulatory region PRO924 is set forth in the sequence listing of PCT/US07/62762; and the sequences of regulatory regions p530c10, pOsFIE2-2, pOsMEA, pOsYp102, and pOsYp285 are set forth in the sequence listing of PCT/US06/038236.

[0198] It will be appreciated that a regulatory region may meet criteria for one classification based on its activity in one plant species, and yet meet criteria for a different classification based on its activity in another plant species.

[0199] i. Broadly Expressing Promoters

[0200] A promoter can be said to be “broadly expressing” when it promotes transcription in many, but not necessarily all, plant tissues. For example, a broadly expressing promoter can promote transcription of an operably linked sequence in one or more of the shoot, shoot tip (apex), and leaves, but weakly or not at all in tissues such as roots or stems. As another example, a broadly expressing promoter can promote transcription of an operably linked sequence in one or more of the stem, shoot, shoot tip (apex), and leaves, but can promote transcription weakly or not at all in tissues such as reproductive tissues of flowers and developing seeds. Non-limiting examples of broadly expressing promoters that can be included in the nucleic acid constructs provided herein include the p326, YP0144, YP0190, p13879, YP0050, p32449, 21876, YP0158, YP0214, YP0380, PT0848, and PT0633 promoters. Additional examples include the cauliflower mosaic virus (CaMV) 35S promoter, the mannopine synthase (MAS) promoter, the 1′ or 2′ promoters derived from T-DNA of Agrobacterium tumefaciens, the figwort mosaic virus 34S promoter, actin promoters such as the rice actin promoter, and ubiquitin promoters such as the maize ubiquitin-1 promoter. In some cases, the CaMV 35S promoter is excluded from the category of broadly expressing promoters.

[0201] ii. Root Promoters

[0202] Root-active promoters confer transcription in root tissue, e.g., root endodermis, root epidermis, or root vascular tissues. In some embodiments, root-active promoters are root-preferential promoters, i.e., confer transcription only or predominantly in root tissue. Root-preferential promoters include the YP0128, YP0275, PT0625, PT0660, PT0683, and PT0758 promoters. Other root-preferential promoters include the PT0613, PT0672, PT0688, and PT0837 promoters, which drive transcription primarily in root tissue and to a lesser extent in ovules and/or seeds. Other examples of root-preferential promoters include the root-specific subdomains of the CaMV 35S promoter (Lam et al., Proc. Natl. Acad. Sci. USA, 86:7890-7894 (1989)), root cell specific promoters reported by Conkling et al., Plant Physiol., 93:1203-1211 (1990), and the tobacco RD2 promoter.

[0203] iii. Maturing Endosperm Promoters

[0204] In some embodiments, promoters that drive transcription in maturing endosperm can be useful. Transcription from a maturing endosperm promoter typically begins after fertilization and occurs primarily in endosperm tissue during seed development and is typically highest during the cellularization phase. Most suitable are promoters that are active predominantly in maturing endosperm, although promoters that are also active in other tissues can sometimes be used. Non-limiting examples of maturing endosperm promoters that can be included in the nucleic acid constructs provided herein include the napin promoter, the Arcelin-5 promoter, the phaseolin promoter (Bustos et al., Plant Cell, 1(9):839-853 (1989)), the soybean trypsin inhibitor promoter (Riggs et al., Plant Cell, 1(6):609-621 (1989)), the ACP promoter (Baerson et al., Plant Mol. Biol., 22(2):255-267 (1993)), the stearoyl-ACP desaturase promoter (Slocombe et al., Plant Physiol., 104(4):167-176 (1994)), the soybean α′ subunit of β-conglycinin promoter (Chen et al., Proc. Natl. Acad. Sci. USA, 83:8560-8564 (1986)), the oleosin promoter (Hong et al., Plant Mol. Biol., 34(3):549-555 (1997)), and zein promoters, such as the 15 kD zein promoter, the 16 kD zein promoter, 19 kD zein promoter, 22 kD zein promoter and 27 kD zein promoter. Also suitable are the Osgt-1 promoter from the rice glutelin-1 gene (Zheng et al., Mol. Cell Biol., 13:5829-5842 (1993)), the beta-amylase promoter, and the barley hordein promoter. Other maturing endosperm promoters include the YP0092, PT0676, and PT0708 promoters.

[0205] iv. Ovary Tissue Promoters

[0206] Promoters that are active in ovary tissues such as the ovule wall and mesocarp can also be useful, e.g., a polygalacturonidase promoter, the banana TRX promoter, the melon actin promoter, YP0396, and PT0623. Examples of promoters that are active primarily in ovules include YP0007, YP0111, YP0092, YP0103, YP0028, YP0121, YP0008, YP0039, YP0115, YP0119, YP0120, and YP0374.

[0207] v. Embryo Sac/Early Endosperm Promoters

[0208] To achieve expression in embryo sac/early endosperm, regulatory regions can be used that are active in polar nuclei and/or the central cell, or in precursors to polar nuclei, but not in egg cells or precursors to egg cells. Most suitable are promoters that drive expression only or predominantly in polar nuclei or precursors thereto and/or the central cell. A pattern of transcription that extends from polar nuclei into early endosperm development can also be found with embryo sac/early endosperm-preferential promoters, although transcription typically decreases significantly in later endosperm development during and after the cellularization phase. Expression in the zygote or developing embryo typically is not present with embryo sac/early endosperm promoters.

[0209] Promoters that may be suitable include those derived from the following genes: Arabidopsis viviparous-1 (see, GenBank No. U93215); Arabidopsis atmycl (see, Urao (1996) Plant Mol. Biol., 32:571-57; Conceicao (1994) Plant, 5:493-505); Arabidopsis FIE (GenBank No. AF129516); Arabidopsis MEA; Arabidopsis FIS2 (GenBank No. AF096096); and FIE 1.1 (U.S. Pat. No. 6,906,244). Other promoters that may be suitable include those derived from the following genes: maize MAC1 (see, Sheridan (1996) Genetics, 142:1009-1020); maize Cat3 (see, GenBank No. L05934; Abler (1993) Plant Mol. Biol., 22:10131-1038). Other promoters include the following Arabidopsis promoters: YP0039, YP0101, YP0102, YP0110, YP0117, YP0119, YP0137, DME, YP0285, and YP0212. Other promoters that may be useful include the following rice promoters: p530c10, pOsFIE2-2, pOsMEA, pOsYp102, and pOsYp285.

[0210] vi. Embryo Promoters

[0211] Regulatory regions that preferentially drive transcription in zygotic cells following fertilization can provide embryo-preferential expression. Most suitable are promoters that preferentially drive transcription in early stage embryos prior to the heart stage, but expression in late stage and maturing embryos is also suitable. Embryo-preferential promoters include the barley lipid transfer protein (Ltp1) promoter (Plant Cell Rep (2001) 20:647-654), YP0097, YP0107, YP0088, YP0143, YP0156, PT0650, PT0695, PT0723, PT0838, PT0879, and PT0740.

[0212] vii. Photosynthetic Tissue Promoters

[0213] Promoters active in photosynthetic tissue confer transcription in green tissues such as leaves and stems. Most suitable are promoters that drive expression only or predominantly in such tissues. Examples of such promoters include the ribulose-1,5-bisphosphate carboxylase (RbcS) promoters such as the RbcS promoter from eastern larch (Larix laricina), the pine cab6 promoter (Yamamoto et al., Plant Cell Physiol., 35:773-778 (1994)), the Cab-1 promoter from wheat (Fejes et al., Plant Mol. Biol., 15:921-932 (1990)), the CAB-1 promoter from spinach (Lubberstedt et al., Plant Physiol., 104:997-1006 (1994)), the cab1R promoter from rice (Luan et al., Plant Cell, 4:971-981 (1992)), the pyruvate orthophosphate dikinase (PPDK) promoter from corn (Matsuoka et al., Proc. Natl. Acad. Sci. USA, 90:9586-9590 (1993)), the tobacco Lhcbl*2 promoter (Cerdan et al., Plant Mol. Biol., 33:245-255 (1997)), the Arabidopsis thaliana SUC2 sucrose-H+ symporter promoter (Truernit et al., Planta, 196:564-570 (1995)), and thylakoid membrane protein promoters from spinach (psaD, psaF, psaE, PC, FNR, atpC, atpD, cab, rbcS). Other photosynthetic tissue promoters include PT0535, PT0668, PT0886, YP0144, YP0380 and PT0585.

[0214] viii. Vascular Tissue Promoters

[0215] Examples of promoters that have high or preferential activity in vascular bundles include YP0087, YP0093, YP0108, YP0022, and YP0080. Other vascular tissue-preferential promoters include the glycine-rich cell wall protein GRP 1.8 promoter (Keller and Baumgartner, Plant Cell, 3(10):1051-1061 (1991)), the Commelina yellow mottle virus (CoYMV) promoter (Medberry et al., Plant Cell, 4(2):185-192 (1992)), and the rice tungro bacilliform virus (RTBV) promoter (Dai et al., Proc. Natl. Acad. Sci. USA, 101(2):687-692 (2004)).

[0216] ix. Inducible Promoters

[0217] Inducible promoters confer transcription in response to external stimuli such as chemical agents or environmental stimuli. For example, inducible promoters can confer transcription in response to hormones such as giberellic acid or ethylene, or in response to light or drought. Examples of drought-inducible promoters include YP0380, PT0848, YP0381, YP0337, PT0633, YP0374, PT0710, YP0356, YP0385, YP0396, YP0388, YP0384, PT0688, YP0286, YP0377, PD1367, and PD0901. Examples of nitrogen-inducible promoters include PT0863, PT0829, PT0665, and PT0886. Examples of shade-inducible promoters include PRO924 and PT0678. An example of a promoter induced by salt is rd29A (Kasuga et al. (1999) Nature Biotech 17: 287-291).

[0218] x. Basal Promoters

[0219] A basal promoter is the minimal sequence necessary for assembly of a transcription complex required for transcription initiation. Basal promoters frequently include a “TATA box” element that may be located between about 15 and about 35 nucleotides upstream from the site of transcription initiation. Basal promoters also may include a “CCAAT box” element (typically the sequence CCAAT) and/or a GGGCG sequence, which can be located between about 40 and about 200 nucleotides, typically about 60 to about 120 nucleotides, upstream from the transcription start site.

[0220] xi. Stem Promoters

[0221] A stem promoter may be specific to one or more stem tissues or specific to stem and other plant parts. Stem promoters may have high or preferential activity in, for example, epidermis and cortex, vascular cambium, procambium, or xylem. Examples of stem promoters include YP0018 which is disclosed in US20060015970 and CryIA(b) and CryIA(c) (Braga et al., Journal of New Seeds 5:209-221 (2003)).

[0222] xii. Other Promoters

[0223] Other classes of promoters include, but are not limited to, shoot-preferential, callus-preferential, trichome cell-preferential, guard cell-preferential such as PT0678, tuber-preferential, parenchyma cell-preferential, and senescence-preferential promoters. Promoters designated YP0086, YP0188, YP0263, PT0758, PT0743, PT0829, YP0119, and YP0096, as described in the above-referenced patent applications, may also be useful.

[0224] xiii. Other Regulatory Regions

[0225] A 5′ untranslated region (UTR) can be included in nucleic acid constructs described herein. A 5′ UTR is transcribed, but is not translated, and lies between the start site of the transcript and the translation initiation codon and may include the +1 nucleotide. A 3′ UTR can be positioned between the translation termination codon and the end of the transcript. UTRs can have particular functions such as increasing mRNA stability or attenuating translation. Examples of 3′ UTRs include, but are not limited to, polyadenylation signals and transcription termination sequences, e.g., a nopaline synthase termination sequence.

[0226] It will be understood that more than one regulatory region may be present in a recombinant polynucleotide, e.g., introns, enhancers, upstream activation regions, transcription terminators, and inducible elements. Thus, for example, more than one regulatory region can be operably linked to the sequence of a polynucleotide encoding a salt and/or oxidative stress tolerance modulating polypeptide.

[0227] Regulatory regions, such as promoters for endogenous genes, can be obtained by chemical synthesis or by subcloning from a genomic DNA that includes such a regulatory region. A nucleic acid comprising such a regulatory region can also include flanking sequences that contain restriction enzyme sites that facilitate subsequent manipulation.

[0228] Alternatively, misexpression can be accomplished using a two component system, whereby the first component consists of a transgenic plant comprising a transcriptional activator operatively linked to a promoter and the second component consists of a transgenic plant that comprise a nucleic acid molecule of the invention operatively linked to the target-binding sequence/region of the transcriptional activator. The two transgenic plants are crossed and the nucleic acid molecule of the invention is expressed in the progeny of the plant. In another alternative embodiment of the present invention, the misexpression can be accomplished by having the sequences of the two component system transformed in one transgenic plant line.

[0229] In some embodiments, a regulatory region may comprise Ceres Promoter PD2995/Ceres Promoter PD2263 (SEQ ID NO: 390), Ceres Promoter PD2999/Ceres Promoter PD2258 (SEQ ID NO: 700), Ceres Promoter PD3006/Ceres Promoter YP0050 (SEQ ID NO: 715), Ceres Promoter PD3141 (SEQ ID NO: 701), Ceres Promoter PD3147/Ceres Promoter YP2663 (SEQ ID NO: 705), Ceres Promoter PT0633 (SEQ ID NO: 143), Ceres Promoter PT0746 (SEQ ID NO: 212), Ceres Promoter PT0758 (SEQ ID NO: 176), Ceres Promoter PT0822 (SEQ ID NO: 716), Ceres Promoter PT0839 (SEQ ID NO: 373), Ceres Promoter PT0888 (SEQ ID NO: 209), Ceres Promoter PT0960 (SEQ ID NO: 213), Ceres Promoter PT0998 (SEQ ID NO: 220), Ceres Promoter PT1026 (SEQ ID NO: 221), Ceres Promoter YP0286 (SEQ ID NO: 268), Ceres Promoter YP0337 (SEQ ID NO: 276), Ceres Promoter YP0381 (SEQ ID NO: 277), Ceres Promoter YP0388 (SEQ ID NO: 309), Ceres Promoter YP1692 (SEQ ID NO: 310), Ceres Promoter YP1894 (SEQ ID NO: 311), Ceres Promoter YP1976 (SEQ ID NO: 312), Ceres Promoter YP2016 (SEQ ID NO: 313), Ceres Promoter YP2097 (SEQ ID NO: 314), Ceres Promoter YP2219 (SEQ ID NO: 267), Ceres Promoter YP2538 (SEQ ID NO: 325), Ceres Promoter YP2552 (SEQ ID NO: 326), Ceres Promoter YP2563 (SEQ ID NO: 327), Ceres Promoter YP2571 (SEQ ID NO: 328), Ceres Promoter YP2573 (SEQ ID NO: 215), Ceres Promoter YP2585 (SEQ ID NO: 214), Ceres Promoter YP2590 (SEQ ID NO: 329), Ceres Promoter YP2606 (SEQ ID NO: 341), Ceres Promoter YP2608 (SEQ ID NO: 342), Ceres Promoter YP2680 (SEQ ID NO: 704), Ceres Promoter YP2683 (SEQ ID NO: 370), Ceres Promoter YP2816 (SEQ ID NO: 371), or Ceres Promoter YP2832 (SEQ ID NO: 372).

### IV. TRANSGENIC PLANTS AND PLANT CELLS

### A. Transformation

[0230] The invention also features transgenic plant cells and plants comprising at least one recombinant nucleic acid construct described herein. A plant or plant cell can be transformed by having a construct integrated into its genome, i.e., can be stably transformed. Stably transformed cells typically retain the introduced nucleic acid with each cell division. A plant or plant cell can also be transiently transformed such that the construct is not integrated into its genome. Transiently transformed cells typically lose all or some portion of the introduced nucleic acid construct with each cell division such that the introduced nucleic acid cannot be detected in daughter cells after a sufficient number of cell divisions. Both transiently transformed and stably transformed transgenic plants and plant cells can be useful in the methods described herein.

[0231] Transgenic plant cells used in methods described herein can constitute part or all of a whole plant. Such plants can be grown in a manner suitable for the species under consideration, either in a growth chamber, a greenhouse, or in a field. Transgenic plants can be bred as desired for a particular purpose, e.g., to introduce a recombinant nucleic acid into other lines, to transfer a recombinant nucleic acid to other species, or for further selection of other desirable traits. Alternatively, transgenic plants can be propagated vegetatively for those species amenable to such techniques. As used herein, a transgenic plant also refers to progeny of an initial transgenic plant, as long as the progeny inherits the transgene. Seeds produced by a transgenic plant can be grown and then selfed (or outcrossed and selfed) to obtain seeds homozygous for the nucleic acid construct.

[0232] Transgenic plants can be grown in suspension culture, or tissue or organ culture. For the purposes of this invention, solid and/or liquid tissue culture techniques can be used. When using solid medium, transgenic plant cells can be placed directly onto the medium or can be placed onto a filter that is then placed in contact with the medium. When using liquid medium, transgenic plant cells can be placed onto a flotation device, e.g., a porous membrane that contacts the liquid medium. A solid medium can be, for example, Murashige and Skoog (MS) medium containing agar and a suitable concentration of an auxin, e.g., 2,4-dichlorophenoxyacetic acid (2,4-D), and a suitable concentration of a cytokinin, e.g., kinetin.

[0233] When transiently transformed plant cells are used, a reporter sequence encoding a reporter polypeptide having a reporter activity can be included in the transformation procedure and an assay for reporter activity or expression can be performed at a suitable time after transformation. A suitable time for conducting the assay typically is about 1-21 days after transformation, e.g., about 1-14 days, about 1-7 days, or about 1-3 days. The use of transient assays is particularly convenient for rapid analysis in different species, or to confirm expression of a heterologous salinity and/or oxidative stress tolerance-modulating polypeptide whose expression has not previously been confirmed in particular recipient cells.

[0234] Techniques for introducing nucleic acids into monocotyledonous and dicotyledonous plants are known in the art, and include, without limitation, Agrobacterium-mediated transformation, viral vector-mediated transformation, electroporation and particle gun transformation, e.g., U.S. Pat. Nos. 5,538,880; 5,204,253; 6,329,571 and 6,013,863. If a cell or cultured tissue is used as the recipient tissue for transformation, plants can be regenerated from transformed cultures if desired, by techniques known to those skilled in the art.

### B. Screening/Selection

[0235] A population of transgenic plants can be screened and/or selected for those members of the population that have a trait or phenotype conferred by expression of the transgene. For example, a population of progeny of a single transformation event can be screened for those plants having a desired level of expression of a salinity and/or oxidative stress tolerance-modulating polypeptide or nucleic acid. Physical and biochemical methods can be used to identify expression levels. These include Southern analysis or PCR amplification for detection of a polynucleotide; Northern blots, S1 RNase protection, primer-extension, or RT-PCR amplification for detecting RNA transcripts; enzymatic assays for detecting enzyme or ribozyme activity of polypeptides and polynucleotides; and protein gel electrophoresis, Western blots, immunoprecipitation, and enzyme-linked immunoassays to detect polypeptides. Other techniques such as in situ hybridization, enzyme staining, and immunostaining also can be used to detect the presence or expression of polypeptides and/or polynucleotides. Methods for performing all of the referenced techniques are known. As an alternative, a population of plants comprising independent transformation events can be screened for those plants having a desired trait, such as a modulated level of salinity and/or oxidative stress tolerance. Selection and/or screening can be carried out over one or more generations, and/or in more than one geographic location. In some cases, transgenic plants can be grown and selected under conditions which induce a desired phenotype or are otherwise necessary to produce a desired phenotype in a transgenic plant. In addition, selection and/or screening can be applied during a particular developmental stage in which the phenotype is expected to be exhibited by the plant. Selection and/or screening can be carried out to choose those transgenic plants having a statistically significant difference in a salinity and/or oxidative stress tolerance level relative to a control plant that lacks the transgene. Selected or screened transgenic plants have an altered phenotype as compared to a corresponding control plant, as described in the “Transgenic Plant Phenotypes” section herein.

[0236] A population of transgenic plants can be screened and/or selected for those members of the population that have a trait or phenotype conferred by expression of the transgene. For example, a population of progeny of a single transformation event can be screened for those plants having a desired level of expression of a saline and/or oxidative stress tolerance-modulating polypeptide and/or nucleic acid. Physical and biochemical methods can be used to identify expression levels. These include Southern analysis or PCR amplification for detection of a polynucleotide; Northern blots, S1 RNase protection, primer-extension, or RT-PCR amplification for detecting RNA transcripts; enzymatic assays for detecting enzyme or ribozyme activity of polypeptides and polynucleotides; and protein gel electrophoresis, Western blots, immunoprecipitation, and enzyme-linked immunoassays to detect polypeptides. Other techniques such as in situ hybridization, enzyme staining, and immunostaining also can be used to detect the presence or expression of polypeptides and/or polynucleotides. Methods for performing all of the referenced techniques are known. As an alternative, a population of plants comprising independent transformation events can be screened for those plants having a desired trait, such as a modulated level of saline and/or oxidative stress tolerance. Selection and/or screening can be carried out over one or more generations, and/or in more than one geographic location. In some cases, transgenic plants can be grown and selected under conditions which induce a desired phenotype or are otherwise necessary to produce a desired phenotype in a transgenic plant. In addition, selection and/or screening can be applied during a particular developmental stage in which the phenotype is expected to be exhibited by the plant. Selection and/or screening can be carried out to choose those transgenic plants having a statistically significant difference in a saline and/or oxidative stress tolerance level relative to a control plant that lacks the transgene. Selected or screened transgenic plants have an altered phenotype as compared to a corresponding control plant, as described in the “Transgenic Plant Phenotypes” section herein.

[0237] C. Plant Species

[0238] The polynucleotides and vectors described herein can be used to transform a number of monocotyledonous and dicotyledonous plants and plant cell systems, including species from one of the following families: Acanthaceae, Alliaceae, Alstroemeriaceae, Amaryllidaceae, Apocynaceae, Arecaceae, Asteraceae, Berberidaceae, Bixaceae, Brassicaceae, Bromeliaceae, Cannabaceae, Caryophyllaceae, Cephalotaxaceae, Chenopodiaceae, Colchicaceae, Cucurbitaceae, Dioscoreaceae, Ephedraceae, Erythroxylaceae, Euphorbiaceae, Fabaceae, Lamiaceae, Linaceae, Lycopodiaceae, Malvaceae, Melanthiaceae, Musaceae, Myrtaceae, Nyssaceae, Papaveraceae, Pinaceae, Plantaginaceae, Poaceae, Rosaceae, Rubiaceae, Salicaceae, Sapindaceae, Solanaceae, Taxaceae, Theaceae, or Vitaceae.

[0239] Suitable species may include members of the genus Abelmoschus, Abies, Acer, Agrostis, Allium, Alstroemeria, Ananas, Andrographis, Andropogon, Artemisia, Arundo, Atropa, Berberis, Beta, Bixa, Brassica, Calendula, Camellia, Camptotheca, Cannabis, Capsicum, Carthamus, Catharanthus, Cephalotaxus, Chrysanthemum, Cinchona, Citrullus, Coffea, Colchicum, Coleus, Cucumis, Cucurbita, Cynodon, Datura, Dianthus, Digitalis, Dioscorea, Elaeis, Ephedra, Erianthus, Erythroxylum, Eucalyptus, Festuca, Fragaria, Galanthus, Glycine, Gossypium, Helianthus, Hevea, Hordeum, Hyoscyamus, Jatropha, Lactuca, Linum, Lolium, Lupinus, Lycopersicon, Lycopodium, Manihot, Medicago, Mentha, Miscanthus, Musa, Nicotiana, Oryza, Panicum, Papaver, Parthenium, Pennisetum, Petunia, Phalaris, Phleum, Pinus, Poa, Poinsettia, Populus, Rauwolfia, Ricinus, Rosa, Saccharum, Salix, Sanguinaria, Scopolia, Secale, Solanum, Sorghum, Spartina, Spinacea, Tanacetum, Taxus, Theobroma, Triticosecale, Triticum, Uniola, Veratrum, Vinca, Vitis, and Zea.

[0240] Suitable species include Panicum spp. or hybrids thereof, Sorghum spp. or hybrids thereof, sudangrass, Miscanthus spp. or hybrids thereof, Saccharum spp. or hybrids thereof, Erianthus spp., Populus spp., Andropogon gerardii (big bluestem), Pennisetum purpureum (elephant grass) or hybrids thereof (e.g., Pennisetum purpureum×Pennisetum typhoidum), Phalaris arundinacea (reed canarygrass), Cynodon dactylon (bermudagrass), Festuca arundinacea (tall fescue), Spartina pectinata (prairie cord-grass), Medicago sativa (alfalfa), Arundo donax (giant reed) or hybrids thereof, Secale cereale (rye), Salix spp. (willow), Eucalyptus spp. (eucalyptus), Triticosecale (Triticum—wheat X rye), Tripsicum dactyloides (Eastern gammagrass), Leymus cinereus (basin wildrye), Leymus condensatus (giant wildrye), and bamboo.

[0241] In some embodiments, a suitable species can be a wild, weedy, or cultivated sorghum species such as, but not limited to, Sorghum almum, Sorghum amplum, Sorghum angustum, Sorghum arundinaceum, Sorghum bicolor (such as bicolor, guinea, caudatum, kafir, and durra), Sorghum brachypodum, Sorghum bulbosum, Sorghum burmahicum, Sorghum controversum, Sorghum drummondii, Sorghum ecarinatum, Sorghum exstans, Sorghum grande, Sorghum halepense, Sorghum interjectum, Sorghum intrans, Sorghum laxiflorum, Sorghum leiocladum, Sorghum macrospermum, Sorghum matarankense, Sorghum miliaceum, Sorghum nigrum, Sorghum nitidum, Sorghum plumosum, Sorghum propinquum, Sorghum purpureosericeum, Sorghum stipoideum, Sorghum sudanensese, Sorghum timorense, Sorghum trichocladum, Sorghum versicolor, Sorghum virgatum, Sorghum vulgare, or hybrids such as Sorghum×almum, Sorghum×sudangrass or Sorghum×drummondii.

[0242] Suitable species also include Helianthus annuus (sunflower), Carthamus tinctorius (safflower), Jatropha curcas (jatropha), Ricinus communis (castor), Elaeis guineensis (palm), Linum usitatissimum (flax), and Brassica juncea.

[0243] Suitable species also include Beta vulgaris (sugarbeet), and Manihot esculenta (cassava).

[0244] Suitable species also include Lycopersicon esculentum (tomato), Lactuca sativa (lettuce), Musa paradisiaca (banana), Solanum tuberosum (potato), Brassica oleracea (broccoli, cauliflower, brussel sprouts), Camellia sinensis (tea), Fragaria ananassa (strawberry), Theobroma cacao (cocoa), Coffea arabica (coffee), Vitis vinifera (grape), Ananas comosus (pineapple), Capsicum annum (hot & sweet pepper), Allium cepa (onion), Cucumis melo (melon), Cucumis sativus (cucumber), Cucurbita maxima (squash), Cucurbita moschata (squash), Spinacea oleracea (spinach), Citrullus lanatus (watermelon), Abelmoschus esculentus (okra), and Solanum melongena (eggplant).

[0245] Suitable species also include Papaver somniferum (opium poppy), Papaver orientale, Taxus baccata, Taxus brevifolia, Artemisia annua, Cannabis sativa, Camptotheca acuminate, Catharanthus roseus, Vinca rosea, Cinchona officinalis, Colchicum autumnale, Veratrum californica, Digitalis lanata, Digitalis purpurea, Dioscorea spp., Andrographis paniculata, Atropa belladonna, Datura stomonium, Berberis spp., Cephalotaxus spp., Ephedra sinica, Ephedra spp., Erythroxylum coca, Galanthus wornorii, Scopolia spp., Lycopodium serratum (=Huperzia serrata), Lycopodium spp., Rauwolfia serpentina, Rauwolfia spp., Sanguinaria canadensis, Hyoscyamus spp., Calendula officinalis, Chrysanthemum parthenium, Coleus forskohlii, and Tanacetum parthenium.

[0246] Suitable species also include Parthenium argentatum (guayule), Hevea spp. (rubber), Mentha spicata (mint), Mentha piperita (mint), Bixa orellana, and Alstroemeria spp.

[0247] Suitable species also include Rosa spp. (rose), Dianthus caryophyllus (carnation), Petunia spp. (petunia) and Poinsettia pulcherrima (poinsettia).

[0248] Suitable species also include Nicotiana tabacum (tobacco), Lupinus albus (lupin), Uniola paniculata (oats), bentgrass (Agrostis spp.), Populus tremuloides (aspen), Pinus spp. (pine), Abies spp. (fir), Acer spp. (maple, Hordeum vulgare (barley), Poa pratensis (bluegrass), Lolium spp. (ryegrass) and Phleum pratense (timothy).

[0249] Thus, the methods and compositions can be used over a broad range of plant species, including species from the dicot genera Brassica, Carthamus, Glycine, Gossypium, Helianthus, Jatropha, Parthenium, Populus, and Ricinus; and the monocot genera Elaeis, Festuca, Hordeum, Lolium, Oryza, Panicum, Pennisetum, Phleum, Poa, Saccharum, Secale, Sorghum, Triticosecale, Triticum, and Zea. In some embodiments, a plant is a member of the species Panicum virgatum (switchgrass), Sorghum bicolor (sorghum, sudangrass), Miscanthus giganteus (miscanthus), Saccharum sp. (energycane), Populus balsamifera (poplar), Zea mays (corn), Glycine max (soybean), Brassica napus (canola), Triticum aestivum (wheat), Gossypium hirsutum (cotton), Oryza sativa (rice), Helianthus annuus (sunflower), Medicago sativa (alfalfa), Beta vulgaris (sugarbeet), or Pennisetum glaucum (pearl millet).

[0250] In certain embodiments, the polynucleotides and vectors described herein can be used to transform a number of monocotyledonous and dicotyledonous plants and plant cell systems, wherein such plants are hybrids of different species or varieties of a specific species (e.g., Saccharum sp. X Miscanthus sp., Saccharum sp. X Sorghum sp., Panicum virgatum×Panicum amarum, Panicum virgatum×Panicum amarulum, and Pennisetum purpureum×Pennisetum typhoidum).

[0251] D. Transgenic Plant Phenotypes

[0252] In some embodiments, a plant in which expression of a salinity and/or oxidative stress modulating polypeptide is modulated can have increased levels of tolerance to salinity and/or oxidative stress. For example, a salinity and/or oxidative stress-modulating polypeptide described herein can be expressed in a transgenic plant, resulting in increased levels of tolerance to salinity and/or oxidative stress. The salinity and/or oxidative stress tolerance levels can be increased by at least 0.25 percent, e.g., 0.25, 0.50, 0.75, 1, 2, 3, 4, 5, 6, 7, 8, 9, 10, 11, 12, 13, 14, 15, 16, 17, 18, 19, 20, 25, 30, 35, 40, 45, 50, 55, 60, 70, 80, 90, 100, 200 or more than 200 percent, as compared to those levels in a corresponding control plant that does not express the transgene. For example, plants as described herein show, under oxidative conditions, increased photosynthetic efficiency and increased seedling area as compared to a plant of the same species that is not genetically modified for substantial vegetative growth. Examples of increases in biomass production include increases of at least 5%, at least 20%, or even at least 50%, when compared to an amount of biomass production by a wild-type plant of the same species under identical conditions. For example, plants transformed with the sequences described herein can exhibit increases in SGI, seedling area and/or SAGI values of at least 5%, at least 10%, at least 25%, at least 50%, at least 75%, at least 100%, at least 200%, at least 300%, at least 400%, or even at least 500%. In some embodiments, plants described herein comprising the transgene corresponding to SEQ ID NO: 316 or 764 show, under normal growing conditions, increased biomass, increased photosynthetic efficiency, increased ry weight, and/or increased seedling area as compared to a plant of the same species that is not genetically modified for substantial vegetative growth.

[0253] In some embodiments, a plant in which expression of a salinity and/or oxidative stress tolerance-modulating polypeptide is modulated can be exposed to salinity and/or oxidative stress conditions for one or more periods of time that may vary depending on climatic conditions. For example, for periods of about ½ hour, 1 hour, 3 hours, 6 hours, 12 hours, 1 day, 3 days, 5 days, 10 days, 1 month, 3 months, 6 months, 12 months, or the entire lifespan of such a plant.

[0254] The nucleic acid molecules and polypeptides described herein are of interest because when the nucleic acid molecules are mis-expressed (i.e., when expressed at a non-natural location or in an increased or decreased amount relative to wild-type) they produce plants that exhibit improved salt tolerance and/or oxidation tolerance as compared to wild-type plants, as evidenced in part by the results of various experiments disclosed below. In particular, plants transformed with the nucleic acid molecules and polypeptides described herein can have any of a number of modified characteristics as compared to wild-type plants. Examples of modified characteristics include photosynthetic efficiency, seedling area, and biomass as it may be measured by plant height, leaf or rosette area, or dry mass. The modified characteristics may be observed and measured at different plant developmental stages, e.g. seed, seedling, bolting, senescense, etc. Often, salt or oxidative tolerance can be expressed as ratios or combinations of measurements, such as salt growth index values, or salicylic acid growth index values. For example, plants transformed with the sequences described herein can exhibit increases in SGI, seedling area and/or SAGI values of at least 5%, at least 10%, at least 25%, at least 50%, at least 75%, at least 100%, at least 200%, at least 300%, at least 400%, or even at least 500%. These traits can be used to exploit or maximize plant products. For example, the nucleic acid molecules and polypeptides described herein are used to increase the expression of genes that cause the plant to have improved biomass, growth rate and/or seedling vigor in saline and/or oxidative conditions, in comparison to wild type plants under the same conditions.

[0255] Because the disclosed sequences and methods increase vegetative growth and growth rate in saline and/or oxidative conditions, the disclosed methods can be used to enhance plant growth in plants grown in saline and/or oxidative conditions. For example, plants described herein show, under saline and/or oxidative conditions, increased photosynthetic efficiency and increased seedling area as compared to a plant of the same species that is not genetically modified for substantial vegetative growth. Examples of increases in biomass production include increases of at least 5%, at least 20%, or even at least 50%, when compared to an amount of biomass production by a wild-type plant of the same species under identical conditions.

[0256] Typically, a difference in the amount of tolerance to salinity and/or oxidative stress in a transgenic plant or cell relative to a control plant or cell is considered statistically significant at p≦0.05 with an appropriate parametric or non-parametric statistic, e.g., Chi-square test, Student's t-test, Mann-Whitney test, or F-test. In some embodiments, a difference in the amount of tolerance to salinity and/or oxidative stress is statistically significant at p<0.05, p<0.01, p<0.005, or p<0.001.

[0257] The phenotype of a transgenic plant is evaluated relative to a control plant. A plant is said “not to express” a polypeptide when the plant exhibits less than 10%, e.g., less than 9%, 8%, 7%, 6%, 5%, 4%, 3%, 2%, 1%, 0.5%, 0.1%, 0.01%, or 0.001%, of the amount of polypeptide or mRNA encoding the polypeptide exhibited by the plant of interest. Expression can be evaluated using methods including, for example, RT-PCR, Northern blots, S1 RNase protection, primer extensions, Western blots, protein gel electrophoresis, immunoprecipitation, enzyme-linked immunoassays, chip assays, and mass spectrometry. It should be noted that if a polypeptide is expressed under the control of a tissue-preferential or broadly expressing promoter, expression can be evaluated in the entire plant or in a selected tissue. Similarly, if a polypeptide is expressed at a particular time, e.g., at a particular time in development or upon induction, expression can be evaluated selectively at a desired time period.

### V. PLANT BREEDING

[0258] Genetic polymorphisms are discrete allelic sequence differences in a population. Typically, an allele that is present at 1% or greater is considered to be a genetic polymorphism. The discovery that polypeptides disclosed herein can modulate salinity and/or oxidative stress tolerance content is useful in plant breeding, because genetic polymorphisms exhibiting a degree of linkage with loci for such polypeptides are more likely to be correlated with variation in a salinity and/or oxidative stress tolerance trait. For example, genetic polymorphisms linked to the loci for such polypeptides are more likely to be useful in marker-assisted breeding programs to create lines having a desired modulation in the salinity and/or oxidative stress tolerance traits.

[0259] Thus, one aspect of the invention includes methods of identifying whether one or more genetic polymorphisms are associated with variation in a salinity and/or oxidative stress tolerance trait. Such methods involve determining whether genetic polymorphisms in a given population exhibit linkage with the locus for one of the polypeptides depicted in FIGS. 1 thru 6 and/or a functional homolog thereof, such as, but not limited to, those identified in the Sequence Listing. The correlation is measured between variation in the salinity and/or oxidative stress tolerance traits in plants of the population and the presence of the genetic polymorphism(s) in plants of the population, thereby identifying whether or not the genetic polymorphism(s) are associated with variation for the traits. If the presence of a particular allele is statistically significantly correlated with a desired modulation in the salinity and/or oxidative stress tolerance traits, the allele is associated with variation for one or both of the traits and is useful as a marker for one or more of the traits. If, on the other hand, the presence of a particular allele is not significantly correlated with the desired modulation, the allele is not associated with variation for one or more of the traits and is not useful as a marker.

[0260] Such methods are applicable to populations containing the naturally occurring endogenous polypeptide rather than an exogenous nucleic acid encoding the polypeptide, i.e., populations that are not transgenic for the exogenous nucleic acid. It will be appreciated, however, that populations suitable for use in the methods may contain a transgene for another, different trait, e.g., herbicide resistance.

[0261] Genetic polymorphisms that are useful in such methods include simple sequence repeats (SSRs, or microsatellites), rapid amplification of polymorphic DNA (RAPDs), single nucleotide polymorphisms (SNPs), amplified fragment length polymorphisms (AFLPs) and restriction fragment length polymorphisms (RFLPs). SSR polymorphisms can be identified, for example, by making sequence specific probes and amplifying template DNA from individuals in the population of interest by PCR. For example, PCR techniques can be used to enzymatically amplify a genetic marker associated with a nucleotide sequence conferring a specific trait (e.g., nucleotide sequences described herein). PCR can be used to amplify specific sequences from DNA as well as RNA, including sequences from total genomic DNA or total cellular RNA. When using RNA as a source of template, reverse transcriptase can be used to synthesize complementary DNA (cDNA) strands. Various PCR methods are described, for example, in PCR Primer: A Laboratory Manual, Dieffenbach and Dveksler, eds., Cold Spring Harbor Laboratory Press, 1995.

[0262] Generally, sequence information from polynucleotides flanking the region of interest or beyond is employed to design oligonucleotide primers that are identical or similar in sequence to opposite strands of the template to be amplified. Primers are typically 14 to 40 nucleotides in length, but can range from 10 nucleotides to hundreds of nucleotides in length. Template and amplified DNA is repeatedly denatured at a high temperature to separate the double strand, then cooled to allow annealing of primers and the extension of nucleotide sequences through the microsatellite, resulting in sufficient DNA for detection of PCR products. If the probes flank an SSR in the population, PCR products of different sizes will be produced. See, e.g., U.S. Pat. No. 5,766,847.

[0263] PCR products can be qualitative or quantitatively analyzed using several techniques. For example, PCR products can be stained with a fluorescent molecule (e.g., PicoGreen® or OliGreen®) and detected in solution using spectrophotometry or capillary electrophoresis. In some cases, PCR products can be separated in a gel matrix (e.g., agarose or polyacrylamide) by electrophoresis, and size-fractionated bands comprising PCR products can be visualized using nucleic acid stains. Suitable stains can fluoresce under UV light (e.g., Ethidium bromide, GR Safe, SYBR® Green, or SYBR® Gold). The results can be visualized via transillumination or epi-illumination, and an image of the fluorescent pattern can be acquired using a camera or scanner, for example. The image can be processed and analyzed using specialized software (e.g., ImageJ) to measure and compare the intensity of a band of interest against a standard loaded on the same gel.

[0264] Alternatively, SSR polymorphisms can be identified by using PCR product(s) as a probe against Southern blots from different individuals in the population. See, U. H. Refseth et al., (1997) Electrophoresis 18: 1519. Briefly, PCR products are separated by length through gel electrophoresis and transferred to a membrane. SSR-specific DNA probes, such as oligonucleotides labeled with radioactive, fluorescent, or chromogenic molecules, are applied to the membrane and hybridize to bound PCR products with a complementary nucleotide sequence. The pattern of hybridization can be visualized by autoradiography or by development of color on the membrane, for example.

[0265] In some cases, PCR products can be quantified using a real-time thermocycler detection system. For example, Quantitative real-time PCR can use a fluorescent dye that forms a DNA-dye-complex (e.g., SYBR® Green), or a fluorophore-containing DNA probe, such as single-stranded oligonucleotides covalently bound to a fluorescent reporter or fluorophore (e.g. 6-carboxyfluorescein or tetrachlorofluorescin) and quencher (e.g., tetramethylrhodamine or dihydrocyclopyrroloindole tripeptide minor groove binder). The fluorescent signal allows detection of the amplified product in real time, thereby indicating the presence of a sequence of interest, and allowing quantification of the copy number of a sequence of interest in cellular DNA or expression level of a sequence of interest from cellular mRNA.

[0266] The identification of RFLPs is discussed, for example, in Alonso-Blanco et al. (Methods in Molecular Biology, vol. 82, “Arabidopsis Protocols”, pp. 137-146, J. M. Martinez-Zapater and J. Salinas, eds., c. 1998 by Humana Press, Totowa, N.J.); Burr (“Mapping Genes with Recombinant Inbreds”, pp. 249-254, in Freeling, M. and V. Walbot (Ed.), The Maize Handbook, c. 1994 by Springer-Verlag New York, Inc.: New York, N.Y., USA; Berlin Germany; Burr et al. Genetics (1998) 118: 519; and Gardiner, J. et al., (1993) Genetics 134: 917). For example, to produce a RFLP library enriched with single- or low-copy expressed sequences, total DNA can be digested with a methylation-sensitive enzyme (e.g., PstI). The digested DNA can be separated by size on a preparative gel. Polynucleotide fragments (500 to 2000 bp) can be excised, eluted and cloned into a plasmid vector (e.g., pUC18). Southern blots of plasmid digests can be probed with total sheared DNA to select clones that hybridize to single- and low-copy sequences. Additional restriction endonucleases can be tested to increase the number of polymorphisms detected.

[0267] The identification of AFLPs is discussed, for example, in EP 0 534 858 and U.S. Pat. No. 5,878,215. In general, total cellular DNA is digested with one or more restriction enzymes. Restriction halfsite-specific adapters are ligated to all restriction fragments and the fragments are selectively amplified with two PCR primers that have corresponding adaptor and restriction site specific sequences. The PCR products can be visualized after size-fractionation, as described above.

[0268] In some embodiments, the methods are directed to breeding a plant line. Such methods use genetic polymorphisms identified as described above in a marker assisted breeding program to facilitate the development of lines that have a desired alteration in the salinity and/or oxidative stress tolerance trait(s). Once a suitable genetic polymorphism is identified as being associated with variation for the trait, one or more individual plants are identified that possess the polymorphic allele correlated with the desired variation. Those plants are then used in a breeding program to combine the polymorphic allele with a plurality of other alleles at other loci that are correlated with the desired variation. Techniques suitable for use in a plant breeding program are known in the art and include, without limitation, backcrossing, mass selection, pedigree breeding, bulk selection, crossing to another population and recurrent selection. These techniques can be used alone or in combination with one or more other techniques in a breeding program. Thus, each identified plants is selfed or crossed a different plant to produce seed which is then germinated to form progeny plants. At least one such progeny plant is then selfed or crossed with a different plant to form a subsequent progeny generation. The breeding program can repeat the steps of selfing or outcrossing for an additional 0 to 5 generations as appropriate in order to achieve the desired uniformity and stability in the resulting plant line, which retains the polymorphic allele. In most breeding programs, analysis for the particular polymorphic allele will be carried out in each generation, although analysis can be carried out in alternate generations if desired.

[0269] In some cases, selection for other useful traits is also carried out, e.g., selection for fungal resistance or bacterial resistance. Selection for such other traits can be carried out before, during or after identification of individual plants that possess the desired polymorphic allele.

### VI. ARTICLES OF MANUFACTURE

[0270] Transgenic plants provided herein have various uses in the agricultural and energy production industries. For example, transgenic plants described herein can be used to make animal feed and food products. Such plants, however, are often particularly useful as a feedstock for energy production.

[0271] Transgenic plants described herein often produce higher yields of grain and/or biomass per hectare, relative to control plants that lack the exogenous nucleic acid. In some embodiments, such transgenic plants provide equivalent or even increased yields of grain and/or biomass per hectare relative to control plants when grown under conditions of reduced inputs such as fertilizer and/or water. Thus, such transgenic plants can be used to provide yield stability at a lower input cost and/or under environmentally stressful conditions such as drought. In some embodiments, plants described herein have a composition that permits more efficient processing into free sugars, and subsequently ethanol, for energy production. In some embodiments, such plants provide higher yields of ethanol, butanol, dimethyl ether, other biofuel molecules, and/or sugar-derived co-products per kilogram of plant material, relative to control plants. By providing higher yields at an equivalent or even decreased cost of production relative to controls, the transgenic plants described herein improve profitability for farmers and processors as well as decrease costs to consumers.

[0272] Seeds from transgenic plants described herein can be conditioned and bagged in packaging material by means known in the art to form an article of manufacture. Packaging material such as paper and cloth are well known in the art. A package of seed can have a label, e.g., a tag or label secured to the packaging material, a label printed on the packaging material, or a label inserted within the package, that describes the nature of the seeds therein.

[0273] Enhanced salintiy and/or oxidative stress tolerance gives the opportunity to grow crops in saline or oxidative stress conditions without stunted growth and diminished yields due to salt-induced ion imbalance, disruption of water homeostasis, inhibition of metabolism, damage to membranes, and/or cell death. The ability to grow plants in saline or oxidative stress conditions would result in an overall expansion of arable land and increased output of land currently marginally productive due to elevated salinity or oxidative stress conditions.

[0274] Seed or seedling vigor is an important characteristic that can greatly influence successful growth of a plant, such as crop plants. Adverse environmental conditions, such as saline and/or oxidative conditions, can affect a plant growth cycle, germination of seeds and seedling vigor (i.e. vitality and strength under such conditions can differentiate between successful and failed plant growth). Seedling vigor has often been defined to comprise the seed properties that determine “the potential for rapid, uniform emergence and development of normal seedlings under a wide range of field conditions”. Hence, it would be advantageous to develop plant seeds with increased vigor, particularly in elevated salinity and/or in oxidative stress conditions.

[0275] For example, increased seedling vigor would be advantageous for cereal plants such as rice, maize, wheat, etc. production. For these crops, germination and growth can often be slowed or stopped by salination and/or oxidation. Genes associated with increased seed vigor under saline and/or oxidative stress conditions have therefore been sought for producing improved plant varieties. (Walia et al. (2005) Plant Physiology 139:822-835).

[0276] The invention will be further described in the following examples, which do not limit the scope of the invention described in the claims.

### VII. EXAMPLES

### Example 1

### Agrobacterium-Mediated Transformation of Arabidopsis

[0277] Host Plants and Transgenes: Wild-type Arabidopsis thaliana Wassilewskija (WS) plants were independently transformed with Ti plasmids containing clones encoding polypeptides at SEQ ID NOs: 2, 11, 102, 32, 138, 149, 441, 172, 764, 389, 316, 200, 697, 239, 892, 922, and 693. Examples include Ceres SEEDLINE ID no. ME24091, Ceres SEEDLINE ID no. ME11932, Ceres SEEDLINE ID no. ME02927, Ceres SEEDLINE ID no. ME08052, Ceres SEEDLINE ID no. ME02441, Ceres SEEDLINE ID no. ME03047, Ceres SEEDLINE ID no. ME03280, Ceres SEEDLINE ID no. ME08564, Ceres SEEDLINE ID no. ME01395, Ceres SEEDLINE ID no. ME06336, Ceres LOCUS ID no. At4g00150, Ceres LOCUS ID no. At3g45100, Ceres CLONE ID no. 547495, Ceres CLONE ID no. 560692, Ceres CLONE ID no. 22538, Ceres CLONE ID no. 210210, and Ceres SEEDLINE ID no. ME07302.

[0278] Unless otherwise indicated, each Ceres Clone and/or Seedline derived from a Clone is in the sense orientation relative to either the 35S promoter in a Ti plasmid. A Ti plasmid vector useful for these constructs, CRS 338, contains the Ceres-constructed, plant selectable marker gene phosphinothricin acetyltransferase (PAT), which confers herbicide resistance to transformed plants. The following is a list of nucleic acids that were isolated from Arabidopsis thaliana plants, Clone 151087 (ME06336) (SEQ ID NO: 439), AT3G20370 (ME03280) (SEQ ID NO: 387), At2g25920 (ME11932) (SEQ ID NO: 891), At4g00150 (ME17768) (SEQ ID NO: 148), At3g45100 (ME10409) (SEQ ID NO: 137), Clone 38456 (ME03047) (SEQ ID NO: 315), Clone 118036 (ME07302) (SEQ ID NO: 691), Clone 109156 (ME02441) (SEQ ID NO: 199), Clone 26652 (ME02927) (SEQ ID NO: 238), Clone 106263 (ME24091) (SEQ ID NO: 921), and Clone 22538 (ME03365) (SEQ ID NO: 10). The nucleic acids designated Clone 234510 (ME06336) (SEQ ID NO: 439), Clone 210210 (ME12933) (SEQ ID NO: 1) and Clone 311714 (ME08052) (SEQ ID NO: 695) were isolated from the species Zea mays. The nucleic acids designated Clone 554359 (ME08564) (SEQ ID NO: 762) and Clone 560692 (ME08322) (SEQ ID NO: 101) were isolated from the species Glycine max.

[0279] The following symbols are used in the Examples with respect to Arabidopsis transformation: T₁: first generation transformant; T₂: second generation, progeny of self-pollinated T₁ plants; T₃: third generation, progeny of self-pollinated T₂ plants; T₄: fourth generation, progeny of self-pollinated T₃ plants. Independent transformations are referred to as events.

[0280] Transgenic Arabidopsis lines containing Clones are designated by identifiers beginning with “ME” as indicated above. The presence of each vector containing a nucleic acid described above in the respective transgenic Arabidopsis line transformed with the vector is confirmed by Finale™ resistance, PCR amplification from green leaf tissue extract, and/or sequencing of PCR products. As controls, wild-type Arabidopsis ecotype Ws plants are transformed with the empty vector SR00559.

[0281] Preparation of Soil Mixture: 24 L Sunshine Mix #5 soil (Sun Gro Horticulture, Ltd., Bellevue, Wash.) is mixed with 16 L Therm-O-Rock vermiculite (Therm-O-Rock West, Inc., Chandler, Ariz.) in a cement mixer to make a 60:40 soil mixture. To the soil mixture is added 2 Tbsp Marathon 1% granules (Hummert, Earth City, Mo.), 3 Tbsp OSMOCOTE® 14-14-14 (Hummert, Earth City, Mo.) and 1 Tbsp Peters fertilizer 20-20-20 (J.R. Peters, Inc., Allentown, Pa.), which are first added to 3 gallons of water and then added to the soil and mixed thoroughly. Generally, 4-inch diameter pots are filled with soil mixture. Pots are then covered with 8-inch squares of nylon netting.

[0282] Planting: Using a 60 mL syringe, 35 mL of the seed mixture is aspirated. 25 drops are added to each pot. Clear propagation domes are placed on top of the pots that are then placed under 55% shade cloth and subirrigated by adding 1 inch of water.

[0283] Plant Maintenance: 3 to 4 days after planting, lids and shade cloth are removed. Plants are watered as needed. After 7-10 days, pots are thinned to 20 plants per pot using forceps. After 2 weeks, all plants are subirrigated with Peters fertilizer at a rate of 1 Tsp per gallon of water. When bolts are about 5-10 cm long, they are clipped between the first node and the base of stem to induce secondary bolts. Dipping infiltration is performed 6 to 7 days after clipping.

[0284] Preparation of Agrobacterium: To 150 mL fresh YEB is added 0.1 mL each of carbenicillin, spectinomycin and rifampicin (each at 100 mg/ml stock concentration). Agrobacterium starter blocks are obtained (96-well block with Agrobacterium cultures grown to an OD600 of approximately 1.0) and inoculated one culture vessel per construct by transferring 1 mL from appropriate well in the starter block. Cultures are then incubated with shaking at 27° C. Cultures are spun down after attaining an OD600 of approximately 1.0 (about 24 hours). 200 mL infiltration media is added to resuspend Agrobacterium pellets. Infiltration media is prepared by adding 2.2 g MS salts, 50g sucrose, and 5 μL 2 mg/ml benzylaminopurine to 900 ml water.

[0285] Dipping Infiltration: The pots are inverted and submerged for 5 minutes so that the aerial portion of the plant is in the Agrobacterium suspension. Plants are allowed to grow normally and seed is collected.

### Example 2

### Saline Condition Screening

[0286] Saline condition screening: Screening is routinely performed by high-salt agar plate assay and also by high-salt soil assay. Traits assessed in high-salt conditions include: seedling area, photosynthesis efficiency, salt growth index and regeneration ability.

[0287] Seedling area: the total leaf area of a young plant about 2 weeks old.

[0288] Photosynthesis efficiency (Fv/Fm): Seedling photosynthetic efficiency, or electron transport via photosystem II, is estimated by the relationship between Fm, the maximum fluorescence signal and the variable fluorescence, Fv. Here, a reduction in the optimum quantum yield (Fv/Fm) indicates stress, and so can be used to monitor the performance of transgenic plants compared to non-transgenic plants under salt stress conditions.

Salt growth index=seedling area×photosynthesis efficiency (Fv/Fm).

[0289] Regeneration ability: the ability of a plant to regenerate shoots in saline soil after stems are cut off and the soil is irrigated with 200 mM NaCl solution.

[0290] Transformant identification: PCR is used to amplify the cDNA insert in one randomly chosen T2 plant. This PCR product was then sequenced to confirm the sequence in the plants.

[0291] Identification of Tolerant Plant to Salt Stress: A superpool of seeds is screened for transgenic plants that show enhanced tolerance to SA, as detailed below, and high salt.

[0292] Assessing Tolerance to Salt Stress: Generally, between four and ten independently transformed plant lines are selected and qualitatively evaluated for their tolerance to salt stress in the T₁ generation. Two or three of the transformed lines that qualitatively show the strongest tolerance to salt stress in the T₁ generation are selected for further evaluation in the T₂ and T₃ generations. This evaluation involves sowing seeds from the selected transformed plant lines on MS agar plates containing either 100 mM or 150 mM NaCl and incubating the seeds for 5 to 14 days to allow for germination and growth. For example, five T₂ events may be compared to wild-type Ws for salt stress tolerance on salt plates. Three events, 01, -03 and -04 may be selected based on the measurement of seedling area on 36 plants of each event as compared to the control, Ws. Further evaluation of salt tolerance in -01, -03 and -04 might be performed with T₂ and T₃ generations.

[0293] Calculating SGI: After germination and growth, seedling area and photosynthesis efficiency of transformed lines and a wild-type control are determined. From these measurements, the Salt Growth Index (SGI) is calculated and compared between wild-type and transformed seedlings. The SGI calculation is made by multiplying seedling area with photosynthesis efficiency measurements taken from two replicates of 36 seedlings for each transformed line and a wild-type control and performing a t-test.

[0294] Determining Transgene Copy Number: T₂ generation transformed plants are tested on BASTATM plates in order to determine the transgene copy number of each transformed line. A BASTATM resistant:BASTATM sensitive segregation ratio of 15:1 generally indicates two copies of the transgene, and such a segregation ratio of 3:1 generally indicates one copy of the transgene.

### Example 3

### Oxidative Stress Conditions Screening

[0295] Under normal growth conditions, Arabidopsis rosette contains about 0.5 μg/g fresh weight of free SA. In response to stress conditions or pathogen attacks, the free SA levels can reach as high as 10 μg/g fresh weight, which is approximately equivalent to 60 μM. The exogenous application of 100-500 μM SA to Arabidopsis leaves by spraying is able to induce strong defense responses without triggering obvious necrotic lesion formation. Once the SA concentration increases to 5 mM or above, the cell death in form of necrotic lesions will appear on the sprayed leaves. If SA is applied through growth media, Arabidopsis is more sensitive to SA-induced oxidative stress, probably because of continuous absorption. The addition of 100-150 μM SA to growth media significant reduces plant growth but does not kills the plants in wild type Arabidopsis Ws. Therefore we use this range of SA to screen for enhanced oxidative stress tolerance.

### Salicylic Acid Screening:

[0296] Screening is routinely performed by agar plate assay using 100 μM or 150 μM exogenous sodium salicylate. Media contains 1/2X MS (Sigma), 150 μM sodium salicylate (Sigma), 0.5 g MES hydrate (Sigma) and 0.7% phytagar (EM Science), adjusted to pH 5.7 using 10N KOH.

[0297] To screen superpools, seeds are surface sterilized in 30% bleach solution for 5 minutes and then rinsed repeatedly with sterile water. Approximately 2500 seeds are sown on media plates in a monolayer at a density of 850 seeds per plate. Wild-type and positive controls are grown on comparable plates. Plates are wrapped with vent tape and placed at 4° C. in the dark for three days to stratify. At the end of this time, plates are transferred to a Conviron growth chamber set at 22° C., 16:8 hour light:dark cycle, 70% humidity with a combination of incandescent and fluorescent lamps emitting a light intensity of ˜100 μEinsteins.

[0298] Seedlings are screened daily starting at 6 days. Seedlings that grow larger and stay greener compared to WS control plants are selected as positive candidates and transferred to soil for recovery and seed set.

[0299] Candidate plants are re-screened by placing 36 seeds from each candidate together with a WS control on the same sodium salicylate plate. Plates are treated as described above and seedling screening begun after at 4 days after germination. Leaf tissue is harvested from confirmed tolerant candidates for DNA extraction and amplification of the transgene by PCR.

[0300] Alternatively, superpool seeds are sown directly on soil and sprayed with 10 mM SA. Leaf tissue is harvested from tolerant candidate plants to isolate DNA for PCR amplification of the transgene and subsequent sequencing of the PCR product.

[0301] Traits assessed under sodium salicylate conditions include: seedling area, photosynthesis efficiency, salicylic acid growth index (SAG) and regeneration ability.

[0302] Seedling area: the total leaf area of a young plant about 2 weeks old.

[0303] Photosynthesis efficiency (Fv/Fm): Seedling photosynthetic efficiency, or electron transport via photosystem II, is estimated by the relationship between Fm, the maximum fluorescence signal and the variable fluorescence, Fv. Here, a reduction in the optimum quantum yield (Fv/Fm) indicates stress, and so can be used to monitor the performance of transgenic plants compared to non-transgenic plants under oxidative stress conditions.

Salicylic Acid Growth (SAG) Index=seedling area (cm²)×photosynthesis efficiency (Fv/Fm).

[0304] PCR is used to amplify the cDNA insert in one randomly chosen T₂ plant. This PCR product is then sequenced to confirm the sequence in the plants.

[0305] Assessing Tolerance to Oxidative Stress: Initially, All available independently transformed T₂ plant lines are qualitatively evaluated for their tolerance to oxidative stress as compared to wild-type controls. The positive transgenic lines that qualitatively show the strongest tolerance to oxidative stress are selected for further evaluation in the T₂ and T₃ generations using internal non-transgenic segregants as controls. This evaluation involves sowing seeds from the selected transformed plant lines on MS agar plates containing 100 μM or 150 μM sodium salicylate and incubating the seeds for at least 4 days to allow for germination and growth and transgene status analysis.

[0306] Calculating SAG: After germination and growth, seedling area and photosynthesis efficiency of transformed lines and a wild-type control are determined. From these measurements, the Salicylic Acid Growth Index (SAG) is calculated and compared between wild-type and transformed seedlings. The SAG calculation is made by multiplying seedling area with photosynthesis efficiency measurements taken from two replicates of 36 seedlings for each transformed line and a wild-type control and performing a t-test.

[0307] Determining Transgene Copy Number: T₂ generation transformed plants are tested on BASTATM plates in order to determine the transgene copy number of each transformed line. A BASTATM resistant:BASTATM sensitive segregation ratio of 15:1 generally indicates two copies of the transgene, and such a segregation ratio of 3:1 generally indicates one copy of the transgene.

[0308] In some cases, validation is perfomed using media that is further supplemented with 100 uM SNP.

### L-arginine Screening:

[0309] Screening superpools for L-arginine (NO) tolerance: about twenty-five hundred seeds of Superpools were sown on MS agar plates containing 10 mM L-arginine (pH 9.0). One-week-old seedlings are screened for better growth on L-arginine media. The tolerant candidates are pulled out and transferred to soil and the seeds are collected from each candidate. The T3 progeny of tolerant candidates are tested on L-arginine media together with Ws controls. Leaf tissue is harvested from the most tolerant candidates to isolate DNA for PCR amplification of the transgene. Sequencing the PCR product is used to reveal which candidates are derived from ME lines.

[0310] Prevalidation and validation assays: For prevalidation, individual T₂ events of an ME line and wild-type Ws control are grown on the same plate containing 10 mM L-arginine (pH 5.7) in a small square format to compare their tolerance to L-arginine-induced oxidative stress. Thirteen seeds are sown in each square and the plate placed under normal growth conditions. Images of seedlings are taken at one week old. The positive events are selected based on the visual evaluation of growth performance in comparison to wild-type control.

[0311] In the validation assay, plants of the positive T₂ or T₃ events of an ME line and wild-type Ws plants are grown on MS agar plates containing 10 mM L-arginine (pH 5.7) for 7-14 days in a pre-determined configuration. The plants are scanned using an EPSON color scanner and chlorophyll fluorescence imager. The seedling area is measured for each plant. After scanning, the plants are transferred to fresh MS plates without L-arginine in the same configuration for recovery. One week after the transfer, the recovered plants are sprayed with Finale™ and transgenic status of each plant scored based on the sensitivity to Finale™. Two plates are used as independent replicates for each event per generation.

[0312] Sequence confirmation: The transgene in an ME line is amplified and sequenced from both sense and antisense orientations.

### Example 4

### ME01359 (Ceres Clone 151087; SEQ ID No.172)

[0313] ME01395 (from Arabidopsis thaliana) showed enhanced tolerance to oxidative stress induced by L-arginine. Wild-type Ws seedlings showed stunted growth on plates containing 10 mM L-arginine, whereas the transgenic plants showed significantly better growth.

[0314] ME01395 was identified from a superpool screen for L-arginine tolerance. Superpool 1 was screened for plants that showed enhanced tolerance to L-arginine using the assay described in Example 2. The progeny of the candidates were tested for L-arginine tolerance in a small square format. The selected tolerant candidates were sequenced and one of them matched the transgene sequence in ME01395. Prevalidation revealed four positive events of ME01395 in L-arginine tolerance. Five T₂ events of ME01395 were compared to wild-type Ws for L-arginine tolerance in a small square format. Four events (ME01395-01, -02, -04 and -05) showed visually better growth under L-arginine stress as compared to Ws. ME01395-02, -04 and -05 were selected for further validation assay in T₂ and T₃ generations.

[0315] ME01395 showed significantly better tolerance to L-arginine than wild-type Ws. ME01395-02, -04 and -05 T₂ plants were assayed in a validation configuration. The transgenic plants were compared to the internal non-transgenic plants as well as external controls that were grown on the same L-arginine plate. For each event, two independent replicates (36 seedlings each) were analyzed. Seedling area was measured for each plant. As shown in Table 1, the differences between transgenic and pooled non-transgenic plants are significant. These results indicate that the enhanced L-arginine stress tolerance is mediated by the transgene.

[0316] Functional analysis of the transgene in L-arginine-induced stress tolerance confirmed that the transgene caused the enhanced L-arginine tolerance, as T₃ lines of ME01395-02, -04 and -05 were further validated. As shown in Table 1, transgenic plants of all tested lines showed better growth than pooled non-transgenic plants under L-arginine stress. These results confirm that the observed L-arginine stress tolerance in ME01395 is mediated by the transgene.

TABLE 1
Validation assay of ME01395 on Arginine
tolerance in two generations.

| | | | | Seedling area of | | | | |
|---|---|---|---|---|---|---|---|---|
| | Seedling area | | | pooled non- | | | | |
| | of transgenics | | | transgenics | | | t-test | Increase |
| ME Events | Avg | SE | N | Avg | SE | N | (p-value) | (%) |
| ME01395- | 1.984 | 0.126 | 30 | 0.939 | 0.119 | 37 | 4.1E−08 | 211.4% |
| 02T₂ | | | | | | | | |
| ME01395- | 2.181 | 0.123 | 26 | 0.860 | 0.101 | 46 | 2.7E−12 | 253.4% |
| 04T₂ | | | | | | | | |
| ME01395- | 2.155 | 0.127 | 26 | 0.777 | 0.082 | 46 | 7.5E−14 | 277.3% |
| 05T₂ | | | | | | | | |
| ME01395- | 0.685 | 0.060 | 32 | 0.297 | 0.065 | 33 | 2.2E−05 | 230.8% |
| 02T₃ | | | | | | | | |
| ME01395- | 0.798 | 0.046 | 35 | 0.560 | 0.068 | 37 | 2.5E−03 | 142.5% |
| 04T₃ | | | | | | | | |
| ME01395- | 0.792 | 0.056 | 51 | 0.297 | 0.064 | 20 | 8.5E−08 | 267.2% |
| 05T₃ | | | | | | | | |

[0317] Events ME01395-02, -04 and -05 segregated for Finale™ resistance in the T₂ generation. ME01395 segregated 1:1 (R:S) for Finale™, whereas ME01395-04 and -05 segregated 3:1 (R:S), suggesting that there is likely one copy of the transgene in each event. Events -02, -04 and -05 of ME01395 are either hemizygous or homozygous for the transgene and exhibited no statistically relevant negative phenotypes in the traits being investigated compared to empty vector control SR00559 under standard growth conditions.

[0318] There was no detectable reduction in germination rate, no morphology/architecture difference as compared to non-transgenic plants was observed, and there were no observable or statistical differences between experimentals and controls for days to flowering, rosette area 7 days post-bolting, or fertility (silique number and seed fill).

### Example 5

### ME06336 (Ceres Clone 234510; SEQ ID No.441)

[0319] ME06336 (from Zea mays) showed enhanced tolerance to oxidative stress induced by salicylic acid (SA). Wild-type Ws seedlings showed necrotic lesions and stunted growth on plates containing 100 or 150 mM SA, whereas the transgenic plants showed significantly better growth.

[0320] ME06336 was identified from superpool screen for SA tolerance. Superpool 51 was screened for transgenic plants that show enhanced tolerance to SA (see Example 2). One candidate was sequenced and the transgene sequence matched ME06336. Two events of ME06336 showed significantly better tolerance to SA than wild-type Ws. In a prevalidation assay, five events of ME06336 (T₂) together with wild-type controls were tested on SA plates for oxidative stress tolerance. Two events, -12 and -13, showed significantly better growth on SA plates as compared to the control. The selected two positive events were further validated in T₂ and T₃ generations.

[0321] T₂ and T₃ validation assays confirmed the SA stress tolerance in ME06336. To confirm that the transgene causes enhanced SA tolerance, T₂ and T₃ generations of the two positive events, ME06336-12 and -13, were further validated. The transgenic plants were compared to the internal non-transgenic plants as well as external controls that were grown on the same SA plate. For each event by generation, two independent replicates (36 seedlings each) were analyzed. For each plant, seedling area was measured to reflect the growth rate under SA-induced oxidative stress (100 μM SA). As shown in Table 2, the T₂ transgenic plants of ME06336-12 and -13 grew significantly larger than pooled non-transgenic plants. In T₃ generation, three individual lines were tested for each event, and transgenic plants in all tested lines except ME06336-13-02 showed better tolerance to SA stress as compared to pooled non-transgenic controls. These results indicate that the enhanced SA stress tolerance is mediated by the transgene.

TABLE 2
Validation assay of ME06336 on SA tolerance in two generations

| | | | | Seedling area | | | | |
|---|---|---|---|---|---|---|---|---|
| | Seedling area | | | of pooled | | | | |
| | of transgenics | | | non-transgenics | | | t-test | Increase |
| ME Events | Avg | SE | N | Avg | SE | N | (p-value) | (%) |
| ME06336- | 0.556 | 0.035 | 37 | 0.355 | 0.041 | 35 | 0.0002 | 156.4% |
| 12T₂ | | | | | | | | |
| ME06336- | 0.498 | 0.038 | 42 | 0.331 | 0.035 | 30 | 0.0010 | 150.6% |
| 13T₂ | | | | | | | | |
| ME06336- | 1.089 | 0.059 | 58 | 0.504 | 0.151 | 12 | 0.0003 | 216.0% |
| 12T₃-01 | | | | | | | | |
| ME06336- | 0.439 | 0.047 | 53 | 0.203 | 0.054 | 18 | 0.0008 | 216.1% |
| 12T₃-05 | | | | | | | | |
| ME06336- | 0.579 | 0.051 | 42 | 0.365 | 0.053 | 28 | 0.0025 | 158.5% |
| 12T₃-06 | | | | | | | | |
| ME06336- | 0.397 | 0.057 | 38 | 0.387 | 0.058 | 27 | 0.4509 | 102.6% |
| 13T₃-02 | | | | | | | | |
| ME06336- | 0.627 | 0.062 | 44 | 0.442 | 0.078 | 28 | 0.0334 | 141.9% |
| 13T₃-03 | | | | | | | | |
| ME06336- | 0.817 | 0.064 | 39 | 0.483 | 0.076 | 30 | 0.0006 | 169.1% |
| 13T₃-04 | | | | | | | | |

[0322] Events ME06336-12 and -13 segregated for Finale™ resistance in the T₃ generation. Both segregate 3:1 (R:S) for Finale™, suggesting that there is only one copy of the transgene in each event. Events -12 and -13 of ME06336 exhibited no statistically relevant negative phenotypes compared to the empty vector control SR00559.

[0323] There was no detectable reduction in germination rate, no morphology/architecture difference as compared to non-transgenic plants was observed, and there were no observable or statistical differences between experimentals and controls for days to flowering, or rosette area 7 days post-bolting.

### Example 6

### ME08564 (Ceres Clone 554359; SEQ ID No. 764)

[0324] ME08564 (from Glycine max) showed enhanced tolerance to oxidative stress induced by salicylic acid (SA) in Events -01 and -02. Wild-type Ws seedlings showed necrotic lesions and stunted growth on plates containing 100 to 150 μM SA, whereas the transgenic plants showed significantly better growth.

[0325] ME08564 was identified from superpool screen for SA tolerance. Superpool 66 was screened for transgenic plants that show enhanced tolerance to SA. The progeny of candidate SP66-2 was further tested for SA tolerance and confirmed to be positive. SP66-2 was sequenced and its transgene matched ME08564. Two events of ME08564 showed significantly better tolerance to SA than wild-type Ws. In a prevalidation assay, four events of ME08564 (T₂) together with wild-type controls were tested on SA plates for oxidative stress tolerance. Two events, -01 and -02, showed significantly better growth on SA plates as compared to the control. The selected two positive events were further validated in T₂ and T₃ generations.

[0326] T₂ and T₃ validation assays confirmed the SA stress tolerance in ME08564. To confirm that the transgene caused enhanced SA tolerance, T₂ and T₃ generations of the two positive events, ME08564-01 and -02, were further validated. The transgenic plants were compared to the internal non-transgenic plants, as well as external controls that were grown on the same SA plate. For each event by generation, two independent replicates (36 seedlings each) were analyzed. For each plant, seedling area was measured to reflect the growth rate under SA-induced oxidative stress (125 μM SA). As shown in Table 3, the T₂ transgenic plants of ME08564-01 and -02 grew significantly larger than pooled non-transgenic plants and the increases were 379.6 and 519.9%, respectively. The differences were repeated in T₃ generation. As compared to the pooled non-transgenic controls, the seedling areas of T₃ ME08564-01 and -02 plants increased 157.2 and 157.4%, respectively. These results indicated that the enhanced SA stress tolerance is mediated by the transgene.

TABLE 3
Validation assay of ME08564 on SA tolerance in two generations.

| | Seedling area | | | Seedling area | | | | |
|---|---|---|---|---|---|---|---|---|
| | of | | | of pooled | | | | |
| | transgenics | | | non-transgenics | | | t-test | Increase |
| ME Events | Avg | SE | N | Avg | SE | N | (p-value) | (%) |
| ME08564- | 0.470 | 0.046 | 42 | 0.124 | 0.034 | 24 | 3.9E−08 | 379.6% |
| 01T₂ | | | | | | | | |
| ME08564- | 0.595 | 0.045 | 47 | 0.115 | 0.030 | 20 | 9.3E−11 | 519.9% |
| 02T₂ | | | | | | | | |
| ME08564- | 0.627 | 0.062 | 43 | 0.399 | 0.069 | 22 | 0.008 | 157.2% |
| 01T₃ | | | | | | | | |
| ME08564- | 0.919 | 0.066 | 50 | 0.584 | 0.135 | 15 | 0.015 | 157.4% |
| 02T₃ | | | | | | | | |

[0327] Events ME08564-01 and -02 segregated for Finale™ resistance in the T₂ generation. Both segregate 3:1 (R:S) for Finale™, suggesting that there is only one copy of the transgene in each event. Events -01 and -02 of ME08564 exhibited no statistically relevant negative phenotypes compared to the empty vector control SR00559.

[0328] There was no detectable reduction in germination rate, no morphology/architecture difference as compared to non-transgenic plants was observed, and there were no observable or statistical differences between experimentals and controls for days to flowering, rosette area 7 days post-bolting, or fertility (silique number and seed fill).

### Example 7

### ME03280 (Ceres clone AT3G20370; SEQ ID No. 389)

[0329] ME03280 showed enhanced tolerance to oxidative stress induced by L-arginine Wild-type Ws seedlings showed stunted growth on plates containing 10 mM L-arginine, whereas the transgenic plants showed significantly better growth.

[0330] ME03280 was identified from a superpool screen for L-Arginine tolerance. Superpool 21 was screened for plants that showed enhanced tolerance to L-arginine. The progeny of the candidates were tested for L-Arginine tolerance in a small square format. The selected tolerant candidates were sequenced and one of them matched the transgene sequence in ME03280.

[0331] Prevalidation revealed four positive events of ME03280 mL-Arginine tolerance. Five T₂ events of ME03280 were compared to wild-type Ws for L-Arginine tolerance in a small square format. Four events (ME03280-01, -03, -04 and -05) showed visually better growth under L-Arginine stress as compared to Ws. The positive events were selected for further validation assay in T₂ and T₃ generations.

[0332] ME03280 showed significantly better tolerance to L-Arginine than wild-type Ws. ME03280-01, -03, -04 and -05 T₂ plants were assayed in a validation configuration. The transgenic plants were compared to the internal non-transgenic plants as well as external controls that were grown on the same L-Arginine plate. For each event, two independent replicates (36 seedlings each) were analyzed. Seedling area was measured for each plant. As shown in Table 1, the differences between transgenic and pooled non-transgenic plants are significant. These results indicate that the enhanced-L-arginine stress tolerance is mediated by the transgene.

[0333] To confirm that the transgene causes the enhanced-L-arginine tolerance, T₃ lines of ME03280-01, -04 and -05 were further validated. As shown in Table 4, transgenic plants of all tested lines showed better growth than pooled non-transgenic plants under L-Arginine-induced stress. These results confirm that the observed better L-arginine stress tolerance in ME03280 is mediated by the transgene.

TABLE 4
Validation assay of ME03280 on Arginine tolerance in two generations

| | Seedling area | | | Seedling | | | | |
|---|---|---|---|---|---|---|---|---|
| | of | | | area of pooled | | | | |
| | transgenics | | | non-transgenics | | | t-test | Increase |
| ME Events | Avg | SE | N | Avg | SE | N | (p-value) | (%) |
| ME03280- | 3.087 | 0.189 | 33 | 2.404 | 0.298 | 30 | 2.75E−02 | 128.4% |
| 01T₂ | | | | | | | | |
| ME03280- | 3.706 | 0.225 | 40 | 1.674 | 0.278 | 29 | 5.73E−08 | 221.4% |
| 03T₂ | | | | | | | | |
| ME03280- | 2.779 | 0.244 | 26 | 1.476 | 0.226 | 25 | 3.67E04 | 188.2% |
| 04T₂ | | | | | | | | |
| ME03280- | 2.845 | 0.167 | 32 | 2.148 | 0.225 | 35 | 1.06E−02 | 132.5% |
| 05T₂ | | | | | | | | |
| ME03280- | 3.900 | 0.245 | 30 | 2.120 | 0.283 | 41 | 2.05E−06 | 184.0% |
| 01T₃-02 | | | | | | | | |
| ME03280- | 3.218 | 0.218 | 36 | 1.763 | 0.264 | 34 | 4.28E−05 | 182.5% |
| 01T₃-03 | | | | | | | | |
| ME03280- | 3.472 | 0.191 | 35 | 1.616 | 0.312 | 36 | 1.48E−07 | 214.8% |
| 04T₃-01 | | | | | | | | |
| ME03280- | 3.282 | 0.246 | 32 | 1.234 | 0.215 | 26 | 6.41E−07 | 266.0% |
| 04T₃-02 | | | | | | | | |
| ME03280- | 3.568 | 0.278 | 26 | 2.050 | 0.281 | 46 | 3.80E−05 | 174.1% |
| 05T₃-01 | | | | | | | | |
| ME03280- | 3.530 | 0.208 | 41 | 3.023 | 0.262 | 31 | 6.72E−02 | 116.8% |
| 05T₃-02 | | | | | | | | |

[0334] Events ME03280-01 and -05 s segregated for Finale™ resistance in the T₂ generation. Both segregate 3:1 (R:S) for Finale™, suggesting that there is only one copy of the transgene in each event. Events -01 and -05 of ME03280 exhibited no statistically relevant negative phenotypes for the tested traits.

[0335] There was no detectable reduction in germination rate, no morphology/architecture difference as compared to non-transgenic plants was observed, and there were no observable or statistical differences between experimentals and controls for days to flowering, rosette area 7 days post-bolting, or fertility (silique number and seed fill).

### Example 8

### ME03047 (Ceres Clone 38456; SEQ ID No. 316)

[0336] ME03047 showed enhanced tolerance to oxidative stress induced by L-arginine. Wild-type Ws seedlings showed stunted growth on plates containing 10 mM L-arginine, whereas the transgenic plants grew significantly better.

[0337] ME03047 was a homolog of a candidate gene identified from a superpool screen for L-arginine tolerance. Superpool 20 was screened for plants that showed enhanced tolerance to L-arginine. The progeny of the candidates were tested for L-arginine tolerance in a small square format. The selected tolerant candidates were sequenced and one of them matched the transgene sequence in ME02927.

[0338] Prevalidation revealed four positive events of ME03047 mL-arginine tolerance. Five T₂ events of ME03047 were compared to wild-type Ws for L-arginine tolerance in a small square format. Four events (ME03047-01, -03 and -05) showed visually better growth under L-arginine stress as compared to Ws. The positive events were selected for further validation assay in T₂ and T₃ generations.

[0339] ME03047 showed significantly better tolerance to L-arginine than wild-type Ws. ME03047-01, -03 and -05 T₂ plants were assayed in a validation configuration. The transgenic plants were compared to the internal non-transgenic plants as well as external controls that were grown on the same L-arginine plate. For each event, two independent replicates (36 seedlings each) were analyzed. Seedling area was measured for each plant. As shown in Table 1, the differences between transgenic and pooled non-transgenic plants are significant. These results indicated that the enhanced-L-arginine stress tolerance is mediated by the transgene.

[0340] The functional confirmation of the transgene in L-arginine-induced stress tolerance. To confirm that the transgene causes the enhanced-L-arginine tolerance, two individual T₃ lines of each positive event were further validated. As shown in Table 5, transgenic plants of all tested lines showed better growth than pooled non-transgenic plants under L-arginine-induced stress. These results confirm that the observed better L-arginine stress tolerance in ME03047 is mediated by the transgene.

TABLE 5
Validation assay of ME03047 on arginine tolerance in two generations.

| | Seedling area | | | Seedling area of | | | | |
|---|---|---|---|---|---|---|---|---|
| | of | | | pooled non- | | | | |
| | transgenics | | | transgenics | | | t-test | Increase |
| ME Events | Avg | SE | N | Avg | SE | N | (p-value) | (%) |
| ME03047- | 3.453 | 0.136 | 36 | 2.218 | 0.244 | 34 | 1.87E−05 | 155.7% |
| 01T₂ | | | | | | | | |
| ME03047- | 3.144 | 0.184 | 32 | 1.518 | 0.228 | 32 | 3.18E−07 | 207.1% |
| 03T₂ | | | | | | | | |
| ME03047- | 4.193 | 0.166 | 38 | 2.520 | 0.341 | 28 | 1.99E−05 | 166.4% |
| 05T₂ | | | | | | | | |
| ME03047- | 4.778 | 0.153 | 37 | 2.935 | 0.357 | 35 | 5.36E−06 | 162.8% |
| 01T₃-01 | | | | | | | | |
| ME03047- | 5.048 | 0.281 | 35 | 1.775 | 0.315 | 37 | 2.60E−11 | 284.5% |
| 01T₃-02 | | | | | | | | |
| ME03047- | 4.278 | 0.150 | 39 | 3.096 | 0.313 | 33 | 5.50E−04 | 138.2% |
| 03T₃-01 | | | | | | | | |
| ME03047- | 4.044 | 0.227 | 38 | 2.264 | 0.328 | 34 | 1.49E−05 | 178.6% |
| 03T₃-02 | | | | | | | | |
| ME03047- | 4.576 | 0.181 | 35 | 2.995 | 0.320 | 37 | 2.78E−05 | 152.8% |
| 05T₃-01 | | | | | | | | |
| ME03047- | 5.184 | 0.224 | 39 | 4.214 | 0.362 | 33 | 1.28E−02 | 123.0% |
| 05T₃-02 | | | | | | | | |

[0341] Events ME03047-01 and -05 segregated for Finale™ resistance in the T₂ generation. Both segregate 3:1 (R:S) for Finale™, suggesting that there is only one copy of the transgene in each event. Events -01 and -05 of ME03047 exhibited no statistically relevant negative phenotypes compared to the empty vector control SR00559.

[0342] There was no detectable reduction in germination rate, no morphology/architecture difference as compared to non-transgenic plants was observed, and there were no observable or statistical differences between experimentals and controls for days to flowering, rosette area 7 days post-bolting, or fertility (silique number and seed fill).

### Example 9

### ME02441 (Ceres Clone 109156; SEQ ID No. 200)

[0343] ME02441 showed enhanced tolerance to oxidative stress induced by L-arginine ME02441 was identified from a superpool screen for L-arginine tolerance. Superpool 06 was screened for plants that showed enhanced tolerance to L-arginine. The progeny of the candidates were tested for L-arginine tolerance in a small square format. The selected tolerant candidates were sequenced and one of them matched the transgene sequence in ME02441.

[0344] Prevalidation revealed two positive events of ME02441 mL-arginine tolerance. Five T₂ events of ME02441 were compared to wild-type Ws for L-arginine tolerance in a small square format. Three events (ME02441-02, -04 and -05) showed visually better growth under L-arginine stress as compared to Ws. The positive events were selected for further validation assay in T₂ and T3₂ generations.

[0345] ME02441 showed significantly better tolerance to L-arginine than wild-type Ws. ME02441-02, -04 and -05 T₂ plants were assayed in a validation configuration. The transgenic plants were compared to the internal non-transgenic plants as well as external controls that were grown on the same L-arginine plate. For each event, two independent replicates (36 seedlings each) were analyzed. Seedling area was measured for each plant. As shown in Table 6, the differences between transgenic and pooled non-transgenic plants were significant. These results indicate that the enhanced-L-arginine stress tolerance is mediated by the transgene.

[0346] The functional confirmation of the transgene in L-arginine-induced stress tolerance. To confirm that the transgene caused the enhanced L-arginine tolerance, three independent T₃ lines of ME02441-02, -04 and -05 were further validated. As shown in Table 6, transgenic plants of ME02441-02-1, -02-02, -02-03, -05-01 and -05-03 showed better growth than pooled non-transgenic plants under L-arginine-induced stress. These results confirmed that the observed better L-arginine stress tolerance in ME02441 is mediated by the transgene.

TABLE 6
Validation assay of ME02441 on arginine tolerance in two generations.

| | | | | Seedling area of | | | | |
|---|---|---|---|---|---|---|---|---|
| | Seedling area of | | | pooled non- | | | | |
| | transgenics | | | transgenics | | | t-test | Increase |
| ME Events | Avg | SE | N | Avg | SE | N | (p-value) | (%) |
| ME02441-02T₂ | 1.30 | 0.072 | 38 | 0.95 | 0.082 | 34 | 0.0010 | 36.89% |
| ME02441-04T₂ | 1.38 | 0.078 | 37 | 1.00 | 0.102 | 34 | 0.0021 | 38.05% |
| ME02441-05T₂ | 1.23 | 0.077 | 43 | 0.91 | 0.093 | 28 | 0.0050 | 35.31% |
| ME02441-02T₃-01 | 5.89 | 0.328 | 33 | 4.05 | 0.400 | 30 | 0.0004 | 45.54% |
| ME02441-02T₃-02 | 5.03 | 0.273 | 33 | 4.11 | 0.320 | 32 | 0.0158 | 22.48% |
| ME02441-02T₃-03 | 5.23 | 0.296 | 39 | 3.63 | 0.354 | 31 | 0.0004 | 44.13% |
| ME02441-04T₃-01 | 4.51 | 0.328 | 36 | 5.21 | 0.515 | 27 | 0.1281 | −13.43% |
| ME02441-04T₃-02 | 4.86 | 0.418 | 25 | 4.78 | 0.272 | 50 | 0.4345 | 1.73% |
| ME02441-04T₃-03 | 4.16 | 0.395 | 19 | 4.71 | 0.336 | 30 | 0.1454 | −11.75% |
| ME02441-05T₃-01 | 6.57 | 0.443 | 23 | 4.45 | 0.590 | 11 | 0.0035 | 47.79% |
| ME02441-05T₃-02 | 5.65 | 0.498 | 39 | 4.76 | 0.546 | 28 | 0.1168 | 18.68% |
| ME02441-05T₃-03 | 4.30 | 0.324 | 28 | 2.67 | 0.521 | 7 | 0.0061 | 60.95% |

[0347] Events ME02441-02 and -05 segregated for Finale™ resistance in the T₂ generation. ME02441-02 segregates 2:1 (R:S) for Finale™ and ME02441-05 segregates 3:1 (R:S), suggesting that there is likely one copy of the transgene in each event, but the transgene inheritance was effected by integration site. Events ME02441-02 and -05 exhibited no statistically relevant negative phenotypes compared to the empty vector control SR00559.

[0348] There was no detectable reduction in germination rate, no morphology/architecture difference as compared to non-transgenic plants was observed, and there were no observable or statistical differences between experimentals and controls for days to flowering, rosette area 7 days post-bolting, or fertility (silique number and seed fill).

### Example 10

### ME08052 (Ceres Clone 311714; SEQ ID No. 697)

[0349] ME08052 showed enhanced tolerance to oxidative stress induced by salicylic acid (SA) in Events -02 and -05 of both T₂ and T₃ generation. ME08052 was identified from superpool screen for SA tolerance. Superpool 62 was screened for transgenic plants that show enhanced tolerance to SA. The progeny of candidate SP62-03 was further tested for SA tolerance and confirmed to be positive. SP62-03 was sequenced and its transgene matched ME08052.

[0350] Multiple events of ME08052 showed significantly better tolerance to SA than wild-type Ws. In a prevalidation assay, five events of ME08052 (T₂) together with wild-type controls were tested on SA plates for oxidative stress tolerance. Four events, -02, -03, 04 and -05, showed better growth on SA plates as compared to the control; Event -02 and -05 displayed especially strong tolerance phenotypes. The selected positive events were further validated in T₂ and T₃ generations.

[0351] T₂ and T₃ validation assays confirmed the SA stress tolerance in ME08052. To confirm that the transgene caused enhanced SA tolerance, T₂ and T₃ generations of the two positive events, ME08052-02 and -05, were further validated. The transgenic plants were compared to the internal non-transgenic plants, as well as external controls that were grown on the same SA plate. For each event by generation, two independent replicates (36 seedlings each) were analyzed. For each plant, seedling area was measured to reflect the growth rate under SA-induced oxidative stress (100 μM SA). As shown in Table 7, the T₂ transgenic plants of ME08052-02 and -05 grew significantly larger than pooled non-transgenic plants and the increases were 37.07 and 46.37%, respectively. The differences were repeated in T₃ generation. As compared to the pooled non-transgenic controls, the seedling areas of T₃ ME08052-02 and -05 plants increased 54.21 and 36.08%, respectively. These results indicated that the enhanced SA stress tolerance is mediated by the transgene.

TABLE 7
Validation assay of ME08052 on SA tolerance in two generations.

| | Seedling area | | | Seedling area | | | | |
|---|---|---|---|---|---|---|---|---|
| | of | | | of pooled | | | | |
| | transgenics | | | non-transgenics | | | t-test | Increase |
| ME Events | Avg | SE | N | Avg | SE | N | (p-value) | (%) |
| ME08052- | 0.62 | 0.048 | 38 | 0.45 | 0.054 | 33 | 0.0116 | 37.07% |
| 02T₂ | | | | | | | | |
| ME08052- | 0.78 | 0.040 | 39 | 0.53 | 0.064 | 31 | 0.0008 | 46.37% |
| 05T₂ | | | | | | | | |
| ME08052- | 1.15 | 0.056 | 42 | 0.75 | 0.094 | 30 | 0.0002 | 54.21% |
| 02T₃ | | | | | | | | |
| ME08052- | 0.98 | 0.069 | 42 | 0.72 | 0.081 | 29 | 0.0085 | 36.08% |
| 05T₃ | | | | | | | | |

[0352] Events ME08052-02 and -05 segregated for Finale™ resistance in the T₂ generation. Both segregated 3:1 (R:S) for Finale™, suggesting that there is only one copy of the transgene in each event. Events -02 and -05 of ME08052 exhibited no statistically relevant negative phenotypes compared to the empty vector control SR00559.

[0353] There was no detectable reduction in germination rate, no morphology/architecture difference as compared to non-transgenic plants was observed, and there were no observable or statistical differences between experimentals and controls for days to flowering, rosette area 7 days post-bolting, or fertility (silique number and seed fill).

### Example 11

### ME02927 (Ceres Clone 26652; SEQ ID No. 239)

[0354] ME02927 showed enhanced tolerance to oxidative stress induced by L-arginine ME02927 was identified from a superpool screen for L-arginine tolerance. Superpool 20 was screened for plants that showed enhanced tolerance to L-arginine. The progeny of the candidates were tested for L-arginine tolerance in a small square format. The selected tolerant candidates were sequenced and one of them matched the transgene sequence in ME02927.

[0355] Prevalidation revealed two positive events of ME02927 in L-arginine tolerance. Four T₂ events of ME02927 were compared to wild-type Ws for L-arginine tolerance in a small square format. Three events (ME02927-03 and -04) showed visually better growth under L-arginine stress as compared to Ws. The positive events were selected for further validation assay in T₂ and T₃ generations.

[0356] ME02927 showed significantly better tolerance to L-arginine than wild-type Ws. ME02927-03 and -04 T₂ plants were assayed in a validation configuration. The transgenic plants were compared to the internal non-transgenic plants as well as external controls that were grown on the same L-arginine plate. For each event, two independent replicates (36 seedlings each) were analyzed. Seedling area was measured for each plant. As shown in Table 8, the differences between transgenic and pooled non-transgenic plants are significant. These results indicate that the enhanced L-arginine stress tolerance is mediated by the transgene.

[0357] To confirm that the transgene caused the enhanced L-arginine tolerance, T₃ lines of ME02927-03 and -04 were further validated. As shown in Table 8, transgenic plants of ME02927-03-01, -03-02, -03-03 and -04-02 showed better growth than pooled non-transgenic plants under L-arginine-induced stress. These results confirmed that the observed better L-arginine stress tolerance in ME02927 is mediated by the transgene.

TABLE 8
Validation assay of ME02927 on arginine tolerance in two generations.

| | Seedling area | | | Seedling area of | | | | |
|---|---|---|---|---|---|---|---|---|
| | of | | | pooled non- | | | t-test | |
| ME | transgenics | | | transgenics | | | (p- | Increase |
| Events | Avg | SE | N | Avg | SE | N | value) | (%) |
| ME02927- | 1.224 | 0.053 | 39 | 0.873 | 0.098 | 32 | 1.17E−03 | 40.30% |
| 03T₂ | | | | | | | | |
| ME02927- | 4.869 | 0.199 | 40 | 3.910 | 0.382 | 32 | 0.0146 | 24.52% |
| 03T₃-01 | | | | | | | | |
| ME02927- | 4.191 | 0.200 | 33 | 3.216 | 0.311 | 38 | 0.0052 | 30.33% |
| 03T₃-02 | | | | | | | | |
| ME02927- | 4.299 | 0.274 | 28 | 3.242 | 0.337 | 43 | 0.0088 | 32.59% |
| 03T₃-03 | | | | | | | | |
| ME02927- | 0.775 | 0.051 | 43 | 0.372 | 0.080 | 25 | 3.42E−05 | 108.14% |
| 04T₂ | | | | | | | | |
| ME02927- | 3.661 | 0.273 | 33 | 2.404 | 0.323 | 36 | 0.0021 | 52.27% |
| 04T₃-02 | | | | | | | | |

[0358] Events ME02927-03 and -04 segregated for Finale™ resistance in the T₂ generation. Both segregate 3:1 (R:S) for Finale™, suggesting that there is only one copy of the transgene in each event. Events WO2927-03 and -04 exhibited no statistically relevant negative phenotypes compared to the empty vector control SR00559.

[0359] There was no detectable reduction in germination rate, no morphology/architecture difference as compared to non-transgenic plants was observed, and there were no observable or statistical differences between experimentals and controls for days to flowering, rosette area 7 days post-bolting, or fertility (silique number and seed fill).

### Example 12

### ME11932 (Ceres Clone At2g25920; SEQ ID No. 892)

[0360] ME11932 showed enhanced tolerance to oxidative stress induced by salicylic acid (SA) in Events -03 and -05 of both T₂ and T₃ generation. ME11932 was identified from superpool screen for SA tolerance. Superpool 90 was screened for transgenic plants that show enhanced tolerance to SA. The progeny of candidate SP90-11 was further tested for SA tolerance and confirmed to be positive. SP90-11 was sequenced and its transgene matched ME11932.

[0361] Multiple events of ME11932 showed significantly better tolerance to SA than wild-type Ws. In a prevalidation assay, five events of ME11932 (T₂) together with wild-type controls were tested on SA plates for oxidative stress tolerance. Two events, -03 and -05, showed significantly better growth on SA plates as compared to the control. The selected positive events were further validated in T₂ and T₃ generations.

[0362] T₂ and T₃ validation assays confirmed the SA stress tolerance in ME11932. To confirm that the transgene caused enhanced SA tolerance, T₂ and T₃ generations of the two positive events, ME11932-03 and -05, were further validated. The transgenic plants were compared to the internal non-transgenic plants, as well as external controls that were grown on the same SA plate. For each event by generation, two independent replicates (36 seedlings each) were analyzed. For each plant, seedling area was measured to reflect the growth rate under SA-induced oxidative stress (100 μM SA). As shown in Table 9, the T₂ transgenic plants of ME11932-03 and -05 grew significantly larger than pooled non-transgenic plants and the increases were 131.88 and 62.05%, respectively. The differences were repeated in T₃ generation. As compared to the pooled non-transgenic controls, the seedling areas of T₃ ME11932-03 and -05 plants increased 531.61 and 146.02%, respectively. These results indicated that the enhanced SA stress tolerance is mediated by the transgene.

TABLE 9
Validation assay of ME11932 on SA tolerance in two generations.

| | Seedling | | | Seedling area | | | | |
|---|---|---|---|---|---|---|---|---|
| | area of | | | of pooled | | | | |
| ME | transgenics | | | non-transgenics | | | t-test | Increase |
| Events | Avg | SE | N | Avg | SE | N | (p-value) | (%) |
| ME11932- | 0.90 | 0.065 | 42 | 0.39 | 0.119 | 16 | 0.0002 | 131.88% |
| 03T₂ | | | | | | | | |
| ME11932- | 0.54 | 0.072 | 39 | 0.33 | 0.099 | 23 | 0.0478 | 62.05% |
| 05T₂ | | | | | | | | |
| ME11932- | 0.48 | 0.066 | 25 | 0.08 | 0.026 | 8 | 1.47E−06 | 531.61% |
| 03T₃ | | | | | | | | |
| ME11932- | 0.44 | 0.073 | 32 | 0.18 | 0.056 | 26 | 0.0032 | 146.02% |
| 05T₃ | | | | | | | | |

[0363] Events ME11932-03 and -05 segregated for Finale™ resistance in the T₂ generation. ME11932-03 segregates 15:1 (R:S) for Finale™, whereas W11932-05 segregates 5:1, suggesting that there are two copies of the transgene in Event -03 and probably one copy in Event -05. Events -03 and -05 of ME11932 exhibited no statistically relevant negative phenotypes compared to the empty vector control SR00559.

[0364] There was no detectable reduction in germination rate, no morphology/architecture difference as compared to non-transgenic plants was observed, and there were no observable or statistical differences between experimentals and controls for days to flowering, rosette area 7 days post-bolting, or fertility (silique number and seed fill).

### Example 13

### ME24091 (Ceres Clone 106263; SEQ ID No. 922)

[0365] ME24091 showed enhanced tolerance to oxidative stress induced by salicylic acid (SA) in Events -05, -06, -07 and -09 of both T₂ and T₃ generations.

[0366] Multiple events of ME24091 showed significantly better tolerance to SA than wild-type Ws. In a prevalidation assay, ten events of ME24091 (T₂) together with wild-type controls were tested on SA plates for oxidative stress tolerance. All ten events showed better growth on SA plates as compared to the control. The selected positive events were further validated in T₂ and T₃ generations.

[0367] T₂ and T₃ validation assays confirmed the SA stress tolerance in ME24091. To confirm that the transgene caused enhanced SA tolerance, all ten T₂ events were validated. The transgenic plants were compared to the internal non-transgenic plants, as well as external controls that were grown on the same SA plate. For each event, two independent replicates (36 seedlings each) were analyzed. For each plant, seedling area was measured to reflect the growth rate under SA-induced oxidative stress (100 μM SA). As shown in Table 10, the T₂ transgenic plants of ME24091-02, -04, -05, -06, -07, -08, -09 and -10 grew significantly larger than pooled non-transgenic plants and the increases were 98.0, 141.5, 43.7, 148.1, 86.6, 88.9, 185.4 and 80.5%, respectively. The positive events were validated again in T₃ generation. The enhanced SA tolerance was confirmed in ME24091-05, -06, -07 and -07. As compared to the pooled non-transgenic controls, the seedling areas of T₃ plants in positive events increased 144.9, 118.2, 162.6 and 63.0%, respectively. These results indicated that the enhanced SA stress tolerance is mediated by the transgene.

TABLE 10
Validation assay of ME24091 on SA tolerance in two generations

| | Seedling | | | Seedling area | | | | |
|---|---|---|---|---|---|---|---|---|
| | area of | | | of pooled | | | | |
| ME | transgenics | | | non-transgenics | | | t-test | Increase |
| Events | Avg | SE | N | Avg | SE | N | (p-value) | (%) |
| ME24091- | 0.55 | 0.049 | 42 | 0.38 | 0.073 | 27 | 0.030 | 43.70% |
| 05T₂ | | | | | | | | |
| ME24091- | 0.71 | 0.049 | 39 | 0.29 | 0.064 | 23 | 1.14E−06 | 148.12% |
| 06T₂ | | | | | | | | |
| ME24091- | 0.69 | 0.054 | 37 | 0.37 | 0.074 | 25 | 0.000 | 86.59% |
| 07T₂ | | | | | | | | |
| ME24091- | 0.81 | 0.056 | 38 | 0.29 | 0.067 | 22 | 5.89E−08 | 185.42% |
| 09T₂ | | | | | | | | |
| ME24091- | 0.38 | 0.068 | 21 | 0.15 | 0.051 | 30 | 0.006 | 144.90% |
| 05T₃ | | | | | | | | |
| ME24091- | 0.49 | 0.073 | 19 | 0.22 | 0.063 | 22 | 0.005 | 118.19% |
| 06T₃ | | | | | | | | |
| ME24091- | 0.49 | 0.053 | 33 | 0.19 | 0.050 | 22 | 5.32E−05 | 162.61% |
| 07T₃ | | | | | | | | |
| ME24091- | 0.45 | 0.055 | 36 | 0.28 | 0.051 | 31 | 0.012 | 62.95% |
| 09T₃ | | | | | | | | |

[0368] Events of ME24091-05, -06, -07 and -09 segregated for Finale™ resistance in the T₂ generation. ME24091-05 segregates 3:1 (R:S) for Finale™, whereas ME24091-06, -07 and -09, segregate 1:1, 2:1 and 5:1, respectively, suggesting that there is likely one copy of the transgene in Events -05, -06, and -07, but two copies in Event -09. The inheritance of the transgene appears to be affected by integration site. Events -05, -06 and -07 of ME24091 exhibited no statistically relevant negative phenotypes compared to the empty vector control SR00559.

[0369] There was no detectable reduction in germination rate, no morphology/architecture difference as compared to non-transgenic plants was observed, and there were no observable or statistical differences between experimentals and controls for days to flowering, rosette area 7 days post-bolting, or fertility (silique number and seed fill).

### Example 14

### ME07302 (Ceres Clone 118036; SEQ ID No. 693)

[0370] ME07302 showed enhanced tolerance to oxidative stress induced by L-arginine Wild-type Ws seedlings showed stunted growth on plates containing 10 mM L-arginine, whereas the transgenic plants showed significantly better growth. ME07302 was identified from a superpool screen for L-arginine tolerance. Superpool 57 was screened for plants that showed enhanced tolerance to L-arginine. The progeny of the candidates were tested for L-arginine tolerance in a small square format. The selected tolerant candidates were sequenced and one of them matched the transgene sequence in ME07302.

[0371] Prevalidation revealed two positive events of ME07302 for L-arginine tolerance. Five T₂ events of ME07302 were compared to wild-type Ws for L-arginine tolerance in a small square format. Two events (ME07302-02, and -04) showed visually better growth under L-arginine stress as compared to Ws. The positive events were selected for further validation assay in T₂ and T₃ generations.

[0372] The functional confirmation of the transgene in L-arginine-induced stress tolerance. To confirm that the transgene caused the enhanced L-arginine tolerance, T₃ lines of ME07302-02 and -04 were further validated. As shown in Table 11, transgenic plants of all tested lines showed better growth than pooled non-transgenic plants under L-arginine-induced stress. These results confirmed that the observed better L-arginine stress tolerance in ME07302 is mediated by the transgene.

TABLE 11
Validation assay of ME07302 for L-arginine tolerance in two generations.

| | Seedling | | | Seedling area of | | | | |
|---|---|---|---|---|---|---|---|---|
| | area of | | | pooled non- | | | | |
| ME | transgenics | | | transgenics | | | t-test | Increase |
| Events | Avg | SE | N | Avg | SE | N | (p-value) | (%) |
| ME07302- | 0.781 | 0.026 | 51 | 0.480 | 0.073 | 21 | 0.000119 | 162.91% |
| 02T₂ | | | | | | | | |
| ME07302- | 0.597 | 0.014 | 54 | 0.433 | 0.060 | 18 | 0.004764 | 137.95% |
| 04T₂ | | | | | | | | |
| ME07302- | 4.050 | 0.175 | 36 | 1.800 | 0.297 | 36 | 4.45E−09 | 225.05% |
| 02T₃ | | | | | | | | |
| ME07302- | 4.603 | 0.154 | 54 | 2.481 | 0.423 | 17 | 6.03E−06 | 185.56% |
| 04T₃ | | | | | | | | |

[0373] Events ME07302-02 and -04 segregated for Finale™ resistance in the T₂ generation. Both segregate 3:1 (R:S) for Finale™, suggesting that there is only one copy of the transgene in each event. Events ME07302-02 and -04 exhibited no statistically relevant negative phenotypes compared to the empty vector control SR00559.

[0374] There was no detectable reduction in germination rate, no morphology/architecture difference as compared to non-transgenic plants was observed, and there were no observable or statistical differences between experimentals and controls for days to flowering, rosette area 7 days post-bolting, or fertility (silique number and seed fill).

### Example 15

### ME03365 (Ceres Clone 22538; SEQ ID No. 11)

[0375] ME03365 showed enhanced stress tolerance to high salt. ME03365 was identified from a superpool screen for salt stress tolerance. Superpool 22 was screened for transgenic plants that showed enhanced tolerance to high salt stress. One of the candidate plants was sequenced and the transgene sequence matched ME03365. Two events of ME03365 showed significantly better tolerance to high salt stress than wild-type Ws. Three T₂ events (-03, -04, -05) together with wild-type controls were tested on salt plates for tolerance. Two events (ME03365-03 and -04) showed obviously better growth on salt plates compared to the controls.

[0376] To confirm that the transgene caused enhanced salt stress tolerance, the transgenic plants were compared to the internal non-transgenic plants, as well as external controls that were grown on the same salt plate. Plants from T₂ and T₃ generations of ME03365-03 and -04 were tested further for salt tolerance. For each event by generation, two independent replicates (36 seedlings each) were analyzed. As shown in Table 12, the SGI value of transgenic plants increased by 62.5 and 41.0%, respectively, as compared to the pooled non-transgenic plants in T₂ generation.

[0377] In the T₃ generation, three individual lines of each event were tested. Five of them showed significantly better tolerance to high salt stress than non-transgenic controls. The SGI value of T₃ positive lines increased by 55.1, 93.9, 27.3, 324.8, 182.0 and 81.8%, respectively, as compared to the pooled non-transgenic controls. The differences between transgenic and non-transgenic plants are significant in ME03365-03 and -04 (T₂ generation) and ME03365-03-01, -03-02, -04-01, -04-02 and -04-03 (T₃ generation).

TABLE 12
Results of ME03365 on salt tolerance assay in two generations.

| | | | | SGI of pooled | | | | | |
|---|---|---|---|---|---|---|---|---|---|
| | SGI* of | | | non- | | | | | |
| | transgenics | | | transgenics | | | t-Test | | SGI |
| ME Events | Avg | SE | N | Avg | SE | N | t-value | t_{0.05} | increase |
| ME03365-03T₂ | 2.734 | 0.313 | 29 | 1.682 | 0.193 | 35 | 2.860 | 1.67 | 62.51% |
| ME03365-03T₃-01 | 3.565 | 0.241 | 20 | 2.298 | 0.260 | 24 | 3.575 | 1.68 | 55.14% |
| ME03365-03T₃-02 | 2.580 | 0.495 | 10 | 1.331 | 0.154 | 39 | 2.409 | 1.68 | 93.88% |
| ME03365-03T₃-03 | 2.332 | 0.260 | 26 | 1.831 | 0.322 | 24 | 1.209 | 1.68 | 27.30% |
| ME03365-04T₂ | 3.201 | 0.288 | 22 | 2.270 | 0.227 | 42 | 2.538 | 1.67 | 41.03% |
| ME03365-04T₃-01 | 2.933 | 0.404 | 15 | 0.690 | 0.129 | 41 | 5.288 | 1.68 | 324.76% |
| ME03365-04T₃-02 | 2.464 | 0.589 | 4 | 0.874 | 0.188 | 24 | 2.573 | 1.71 | 181.98% |
| ME03365-04T₃-03 | 3.065 | 0.344 | 23 | 1.686 | 0.241 | 43 | 3.282 | 1.67 | 81.75% |

*SGI (Salt Growth Index) = seedling area × Fv/Fm (photosynthesis efficiency)

[0378] Events ME03365-03 segregated for Finale™ in the T₂ generation. Both events segregated ˜1:1 for Finale™, suggesting that there is only one copy of the transgene with segregation distortion toward non-transgenics. Events -03 and -04 of ME03365 exhibited no statistically relevant negative phenotypes compared to the empty vector control SR00559.

[0379] There was no detectable reduction in germination rate, no morphology/architecture difference as compared to non-transgenic plants was observed, and there were no observable or statistical differences between experimentals and controls for days to flowering, rosette area 7 days post-bolting, or fertility (silique number and seed fill).

### Example 16

### ME08322 (Ceres Clone 560692; SEQ ID No. 102)

[0380] ME08322 showed enhanced stress tolerance to high salt. ME08322 was identified from a superpool screen for salt stress tolerance. Superpool 64 was screened for transgenic plants that show enhanced tolerance to high salt stress. One of the candidate plants was sequenced and the transgene sequence matches ME08322. Two events of ME08322 showed significantly better tolerance to high salt stress than wild-type Ws. Five T₂ events (-01 to -05) together with wild-type controls were tested on salt plates for tolerance. Two events (ME08322-01 and -05) showed obviously better growth on salt plates as compared to the control.

[0381] Functional confirmation of the transgene in salt stress tolerance. To confirm that the transgene caused enhanced salt stress tolerance, the transgenic plants were compared to the internal non-transgenic plants, as well as external controls that were grown on the same salt plate. Plants from T₂ and T₃ generations of ME08322-01 and -05 were tested further for salt tolerance. For each event by generation, two independent replicates (36 seedlings each) were analyzed. As shown in Table 13, the SGI value of transgenic plants increased by 24.3 and 40.6%, respectively, as compared to the pooled non-transgenic plants in T₂ generation.

[0382] In the T₃ generation, three individual lines of each event were tested. All of them showed significantly better tolerance to high salt stress than non-transgenic controls. The SGI value of T₃ positive lines increased by 45.3, 39.5, 65.0, 31.5, 29.4 and 177.7%, respectively, as compared to the pooled non-transgenic controls. The differences between transgenic and non-transgenic plants are significant in ME08322-01 and -05 (T₂ generation) and ME08322-01-01, -01-02, -01-03, -05-01, -05-02 and -05-03 (T₃ generation).

TABLE 13
Results of ME08322 on salt tolerance assay in two generations.

| | | | | SGI of pooled | | | | |
|---|---|---|---|---|---|---|---|---|
| | SGI* of | | | non- | | | | |
| ME | transgenics | | | transgenics | | | t-Test | SGI |
| Events | Avg | SE | N | Avg | SE | N | P-value | increase |
| ME08322- | 3.81 | 0.264 | 39 | 3.07 | 0.363 | 32 | 0.051 | 24.30% |
| 01T₂ | | | | | | | | |
| ME08322- | 3.99 | 0.315 | 32 | 2.84 | 0.371 | 32 | 0.010 | 40.58% |
| 05T₂ | | | | | | | | |
| ME08322- | 3.69 | 0.358 | 25 | 2.54 | 0.390 | 27 | 0.017 | 45.34% |
| 01T₂-01 | | | | | | | | |
| ME08322- | 2.97 | 0.325 | 27 | 2.13 | 0.304 | 25 | 0.032 | 39.46% |
| 01T₂-02 | | | | | | | | |
| ME08322- | 2.95 | 0.267 | 41 | 1.79 | 0.265 | 25 | 0.001 | 64.95% |
| 01T₂-03 | | | | | | | | |
| ME08322- | 2.87 | 0.208 | 42 | 2.18 | 0.303 | 30 | 0.033 | 31.49% |
| 05T₃-01 | | | | | | | | |
| ME08322- | 2.98 | 0.243 | 40 | 2.30 | 0.278 | 32 | 0.036 | 29.35% |
| 05T₃-02 | | | | | | | | |
| ME08322- | 3.62 | 0.191 | 48 | 1.30 | 0.197 | 24 | 1.42E−12 | 177.69% |
| 05T₃-03 | | | | | | | | |

*SGI (Salt Growth Index) = seedling area × Fv/Fm (photosynthesis efficiency)

[0383] Events ME08322-01 and -05 segregated for Finale™ resistance in the T₂ generation. Both events segregated 3:1 for Finale™, suggesting that there is only one copy of the transgene. Events -01 and -05 of ME08322 exhibited no statistically relevant negative phenotypes compared to the empty vector control SR00559.

[0384] There was no detectable reduction in germination rate, no morphology/architecture difference as compared to non-transgenic plants was observed, and there were no observable or statistical differences between experimentals and controls for days to flowering, rosette area 7 days post-bolting, or fertility (silique number and seed fill).

### Example 17

### ME08655 (Ceres Clone 547495; SEQ ID No. 32)

[0385] ME08655 showed enhanced stress tolerance to high salt. ME08655 was identified from a superpool screen for salt stress tolerance. Superpool 67 was screened for transgenic plants that show enhanced tolerance to high salt stress. One of the candidate plants was sequenced and the transgene sequence matches ME08655.

[0386] Three events of ME08655 showed significantly better tolerance to high salt stress than wild-type Ws. Five T₂ events (-01 to -05) together with wild-type controls were tested on salt plates for tolerance. Three events (ME08655-01, -02 and -05) showed obviously better growth on salt plates as compared to the control.

[0387] Functional confirmation of the transgene in salt stress tolerance. To confirm that the transgene caused enhanced salt stress tolerance, the transgenic plants were compared to the internal non-transgenic plants, as well as external controls that were grown on the same salt plate. Plants from T₂ generation of ME08655-01, -02 and -05 were validated for salt tolerance. For each event, two independent replicates (36 seedlings each) were analyzed. As shown in Table 14, the SGI value of transgenic plants increased by 27.7, 25.7 and 48.3%, respectively, as compared to the pooled non-transgenic plants in T₂ generation. The differences were significant for ME08655-02 and -05, but not for -01. The two positive events were further validated in the T₃ generation. Three individual lines of each event were tested. Four of them showed significantly better tolerance to high salt stress than non-transgenic controls. The SGI value of T₃ positive lines increased by 20.7, 29.0, 18.2 and 37.1%, respectively, as compared to the pooled non-transgenic controls.

TABLE 14
Results of ME08655 on salt tolerance assay in two generations.

| | | | | SGI of pooled | | | | |
|---|---|---|---|---|---|---|---|---|
| | SGI* of | | | non- | | | | |
| | transgenics | | | transgenics | | | t-Test | SGI |
| ME Events | Avg | SE | N | Avg | SE | N | p-value | increase |
| ME08655-02T₂ | 3.80 | 0.292 | 26 | 3.02 | 0.313 | 34 | 0.037 | 25.71% |
| ME08655- | 3.80 | 0.246 | 38 | 3.88 | 0.270 | 32 | 0.415 | −2.03% |
| 02T₃-01 | | | | | | | | |
| ME08655- | 3.75 | 0.209 | 32 | 3.49 | 0.201 | 39 | 0.179 | 07.70% |
| 02T₃-02 | | | | | | | | |
| ME08655- | 3.79 | 0.197 | 39 | 3.14 | 0.260 | 32 | 0.025 | 20.73% |
| 02T₃-03 | | | | | | | | |
| ME08655-05T₂ | 4.22 | 0.359 | 31 | 2.84 | 0.338 | 30 | 0.004 | 48.43% |
| ME08655- | 3.90 | 0.326 | 31 | 3.02 | 0.262 | 40 | 0.020 | 29.01% |
| 05T₃-01 | | | | | | | | |
| ME08655- | 3.74 | 0.241 | 34 | 3.17 | 0.249 | 35 | 0.051 | 18.19% |
| 05T₃-02 | | | | | | | | |
| ME08655- | 3.47 | 0.238 | 32 | 2.53 | 0.226 | 37 | 0.003 | 37.14% |
| 05T₃-03 | | | | | | | | |

*SGI (Salt Growth Index) = seedling area × Fv/Fm (photosynthesis efficiency)

[0388] Events ME08655-02 and -05 segregated for Finale™ resistance in the T₂ generation. ME08655-02 segregated ˜2:1 for Finale™, and ME08655-05 1:1, suggesting that there is likely one copy of the transgene with a segregation distortion towards non-transgenics. Events -02 and -05 of ME08655 exhibited no statistically relevant negative phenotypes compared to the empty vector control SR00559.

[0389] There was no detectable reduction in germination rate, no morphology/architecture difference as compared to non-transgenic plants was observed, and there were no observable or statistical differences between experimentals and controls for days to flowering, rosette area 7 days post-bolting, or fertility (silique number and seed fill).

### Example 18

### ME10409 (Ceres Clone At3g45100; SEQ ID No. 138)

[0390] ME10409 shows enhanced stress tolerance to high salt. ME10409 was identified from a superpool screen for salt stress tolerance. Superpool 77 was screened for transgenic plants that show enhanced tolerance to high salt stress. One of the candidate plants was sequenced and the transgene sequence matches ME10409.

[0391] Three events of ME10409 showed significantly better tolerance to high salt stress than wild-type Ws. Five T₂ events (-01 to -05) together with wild-type controls were tested on salt plates for tolerance. Three events (ME10409-01, -02 and -04) showed obviously better growth on salt plates as compared to the control.

[0392] Functional confirmation of the transgene in salt stress tolerance. To confirm that the transgene caused enhanced salt stress tolerance, the transgenic plants were compared to the internal non-transgenic plants, as well as external controls that were grown on the same salt plate. Plants of ME10409-01 and -04 from T₂ and T₃ generations were validated for salt tolerance. ME10409-02 was not tested because the seeds were unavailable. In the validation assay for each event by generation, two independent replicates (36 seedlings each) were analyzed. As shown in Table 15, the SGI value of transgenic plants increased by 50.3 and 71.1%, respectively, as compared to the pooled non-transgenic plants in T₂ generation. The differences were significant for ME10409-01 and -04. In T₃ generation, three individual lines of each event were tested. Four of them showed significantly better tolerance to high salt stress than non-transgenic controls. The SGI value of T₃ positive lines increased by 107.1, 50.0, 21.0 and 36.8%, respectively, as compared to the pooled non-transgenic controls. The differences between transgenic and non-transgenic plants in ME10409-01-01 and -01-03 and ME10409-04-02 and -04-03 were significant.

TABLE 15
Results of ME10409 on salt tolerance assay in two generations.

| | | | | SGI of pooled | | | | | |
|---|---|---|---|---|---|---|---|---|---|
| | SGI* of | | | non- | | | | | |
| | transgenics | | | transgenics | | | t-Test | | SGI |
| ME Events | Avg | SE | N | Avg | SE | N | P-value | P0.05 | increase |
| ME10409-01T₂ | 2.796 | 0.266 | 33 | 1.861 | 0.187 | 39 | 2.88 | 1.67 | 50.28% |
| ME10409-01T₃-01 | 4.473 | 0.300 | 35 | 2.159 | 0.298 | 30 | 5.47 | 1.67 | 107.12% |
| ME10409-01T₃-02 | 4.234 | 0.183 | 31 | 3.618 | 0.290 | 36 | 1.80 | 1.67 | 17.03% |
| ME10409-01T₃-03 | 3.478 | 0.215 | 39 | 2.319 | 0.265 | 31 | 3.40 | 1.67 | 49.99% |
| ME10409-04T₂ | 2.716 | 0.286 | 29 | 1.588 | 0.173 | 38 | 3.38 | 1.67 | 71.06% |
| ME10409-04T₃-01 | 4.164 | 0.270 | 32 | 3.544 | 0.365 | 34 | 1.36 | 1.67 | 17.49% |
| ME10409-04T₃-02 | 4.359 | 0.360 | 20 | 3.603 | 0.273 | 42 | 1.68 | 1.67 | 20.99% |
| ME10409-04T₃-03 | 4.117 | 0.323 | 24 | 3.010 | 0.340 | 42 | 2.36 | 1.67 | 36.76% |

*SGI (Salt Growth Index) = seedling area × Fv/Fm (photosynthesis efficiency)

[0393] Events ME10409-01 segregated for Finale™ in the T₂ generation. W10409-01 segregated ˜2:1 and ME10409-04 1:1 for Finale™ indicating some segregation distortion. Events -01 and -04 of ME10409 exhibited no statistically relevant negative phenotypes compared to the empty vector control SR00559.

[0394] There was no detectable reduction in germination rate, no morphology/architecture difference as compared to non-transgenic plants was observed, and there were no observable or statistical differences between experimentals and controls for days to flowering, rosette area 7 days post-bolting, or fertility (silique number and seed fill).

### Example 19

### ME17768 (Ceres Clone At4g00150; SEQ ID No. 149)

[0395] ME17768 showed enhanced stress tolerance to high salt. ME17768 was identified from a superpool screen for salt stress tolerance. Superpool 114 was screened for transgenic plants that show enhanced tolerance to high salt stress. One of the candidate plants was sequenced and the transgene sequence matched ME17768.

[0396] Three events of ME17768 showed better tolerance to high salt stress than wild-type Ws. Four T₂ events (-01 to -04) together with wild-type controls were tested on salt plates for tolerance. Three events (ME17768-02, -03 and -04) showed obviously better growth on salt plates as compared to the control.

[0397] Functional confirmation of the transgene in salt stress tolerance. To confirm that the transgene caused enhanced salt stress tolerance, the transgenic plants were compared to the internal non-transgenic plants, as well as external controls that were grown on the same salt plate. Plants from T₂ generation of ME17768-02, -03 and -04 validated for salt tolerance. For each event, two independent replicates (36 seedlings each) were analyzed. As shown in Table 16, the SGI value of transgenic plants increased by 325.1, 67.0 and 79.7% in ME17768-02, -03 and -04, respectively, as compared to the pooled non-transgenic plants in T₂ generation.

[0398] In T₃ generation, plants of ME17768-02 and -03 were further validated. Both showed significantly better tolerance to high salt stress than non-transgenic controls. The SGI value increased by 144.7 and 21.6%, respectively, as compared to the pooled non-transgenic controls. The differences between transgenic and non-transgenic plants are significant in all validated events.

TABLE 16
Results of ME17768 on salt tolerance assay in two generations.

| | | | | SGI of pooled | | | | |
|---|---|---|---|---|---|---|---|---|
| | SGI* of | | | non- | | | | |
| ME | transgenics | | | transgenics | | | t-Test | SGI |
| Events | Avg | SE | N | Avg | SE | N | P-value | increase |
| ME17768- | 1.02 | 0.188 | 10 | 0.24 | 0.144 | 7 | 0.002 | 325.14% |
| 02T₂ | | | | | | | | |
| ME17768- | 3.84 | 0.192 | 36 | 1.57 | 0.314 | 29 | 2.67E−08 | 144.70% |
| 02T₃ | | | | | | | | |
| ME17768- | 0.98 | 0.094 | 15 | 0.59 | 0.119 | 8 | 0.008 | 67.04% |
| 03T₂ | | | | | | | | |
| ME17768- | 3.60 | 0.202 | 42 | 2.96 | 0.297 | 30 | 0.040 | 21.60% |
| 03T₃ | | | | | | | | |

*SGI (Salt Growth Index) = seedling area × Fv/Fm (photosynthesis efficiency)

[0399] Events ME17768-02 and -03 segregated for Finale™ resistance in the T₂ generation. ME17768-02 segregated 8:1 for Finale™, suggesting that there are likely two copies of the transgene in this event. ME17768-03 segregated 3:1 for Finale™, suggesting that there is only one copy of the transgene in the event. Events -02 and -03 of ME17768 exhibited no statistically relevant negative phenotypes compared to the empty vector control SR00559.

[0400] There was no detectable reduction in germination rate, no morphology/architecture difference as compared to non-transgenic plants was observed, and there were no observable or statistical differences between experimentals and controls for days to flowering, rosette area 7 days post-bolting, or fertility (silique number and seed fill).

### Example 20

### ME12933 (Ceres Clone 210210; SEQ ID No. 2)

[0401] ME12933 showed enhanced stress tolerance to high salt. ME12933 was identified from a superpool screen for salt stress tolerance. Superpool 97 was screened for transgenic plants that show enhanced tolerance to high salt stress. One of the candidate plants was sequenced and the transgene sequence matches ME12933.

[0402] Two events of ME12933 showed significantly better tolerance to high salt stress than wild-type Ws. Five T₂ events (-01 to -05) together with wild-type controls were tested on salt plates for tolerance. Two events (ME12933-01 and -05) showed obviously better growth on salt plates as compared to the control.

[0403] Functional confirmation of the transgene in salt stress tolerance. To confirm that the transgene caused enhanced salt stress tolerance, the transgenic plants were compared to the internal non-transgenic plants, as well as external controls that were grown on the same salt plate. Plants from T₂ and T₃ generations of ME12933-01 and -05 were tested further for salt tolerance. For each event by generation, two independent replicates (36 seedlings each) were analyzed. As shown in Table 17, the SGI value of transgenic plants increased by 78.6 and 62.2%, respectively, as compared to the pooled non-transgenic plants in T₂ generation. In the T₃ generation, three individual lines of each event were tested. Four of them showed significantly better tolerance to high salt stress than non-transgenic controls. The SGI value of T₃ positive lines increased by 21.3, 47.6, 32.9 and 19.4%, respectively, as compared to the pooled non-transgenic controls. The differences between transgenic and non-transgenic plants are significant in ME12933-01 and -05 (T₂ generation) and ME12922-01-01, -01-03, -05-02 and -05-03 (T₃ generation).

TABLE 17
Results of ME12933 on salt tolerance assay in two generations.

| | | | | SGI of pooled | | | | | |
|---|---|---|---|---|---|---|---|---|---|
| | SGI* of | | | non- | | | t-Test | | |
| ME | transgenics | | | transgenics | | | t- | | SGI |
| Events | Avg | SE | N | Avg | SE | N | value | t_{0.05} | increase |
| ME12933- | 2.895 | 0.231 | 35 | 1.621 | 0.224 | 33 | 3.96 | 1.67 | 78.6% |
| 01 T₂ | | | | | | | | | |
| ME12933- | 2.830 | 0.235 | 33 | 1.745 | 0.223 | 38 | 3.35 | 1.67 | 62.2% |
| 05 T₂ | | | | | | | | | |
| ME12933- | 4.204 | 0.223 | 40 | 3.466 | 0.323 | 29 | 1.88 | 1.67 | 21.3% |
| 01-01 | | | | | | | | | |
| ME12933- | 4.069 | 0.258 | 37 | 3.432 | 0.340 | 26 | 1.49 | 1.67 | 18.6% |
| 01-02 | | | | | | | | | |
| ME12933- | 4.307 | 0.239 | 38 | 2.917 | 0.311 | 32 | 3.54 | 1.67 | 47.6% |
| 01-03 | | | | | | | | | |
| ME12933- | 3.747 | 0.225 | 38 | 3.845 | 0.335 | 33 | −0.24 | 1.67 | −2.6% |
| 05-01 | | | | | | | | | |
| ME12933- | 3.450 | 0.175 | 55 | 2.596 | 0.425 | 17 | 1.86 | 1.67 | 32.9% |
| 05-02 | | | | | | | | | |
| ME12933- | 3.935 | 0.259 | 35 | 3.295 | 0.256 | 32 | 1.76 | 1.67 | 19.4% |
| 05-03 | | | | | | | | | |

*SGI (Salt Growth Index) = seedling area × Fv/Fm (photosynthesis efficiency)

[0404] T₂ plants of ME12933-01 and -05 were tested on Finale™ plates for the number of copies of the transgene. ME12933-01 segregated 3:1 (R:S) for Finale™, suggesting that there is only one copy of the transgene in this event. ME12933-05 segregated 1:1 (R:S) for Finale™ indicating some segregation distortion.

[0405] Events -01 and -05 of ME12933 exhibited no statistically relevant negative phenotypes compared to the empty vector control SR00559. There was no detectable reduction in germination rate, no morphology/architecture difference as compared to non-transgenic plants was observed, and there were no observable or statistical differences between experimentals and controls for days to flowering, rosette area 7 days post-bolting, or fertility (silique number and seed fill).

### Example 21

### Determination of Functional Homologs by Reciprocal BLAST

[0406] A candidate sequence was considered a functional homolog of a reference sequence if the candidate and reference sequences encoded proteins having a similar function and/or activity. A process known as Reciprocal BLAST (Rivera et al., Proc. Natl. Acad. Sci. USA, 95:6239-6244 (1998)) was used to identify potential functional homolog sequences from databases consisting of all available public and proprietary peptide sequences, including NR from NCBI and peptide translations from Ceres clones.

[0407] Before starting a Reciprocal BLAST process, a specific reference polypeptide was searched against all peptides from its source species using BLAST in order to identify polypeptides having BLAST sequence identity of 80% or greater to the reference polypeptide and an alignment length of 85% or greater along the shorter sequence in the alignment. The reference polypeptide and any of the aforementioned identified polypeptides were designated as a cluster.

[0408] The BLASTP version 2.0 program from Washington University at Saint Louis, Mo., USA was used to determine BLAST sequence identity and E-value. The BLASTP version 2.0 program includes the following parameters: 1) an E-value cutoff of 1.0e-5; 2) a word size of 5; and 3) the -postsw option. The BLAST sequence identity was calculated based on the alignment of the first BLAST HSP (High-scoring Segment Pairs) of the identified potential functional homolog sequence with a specific reference polypeptide. The number of identically matched residues in the BLAST HSP alignment was divided by the HSP length, and then multiplied by 100 to get the BLAST sequence identity. The HSP length typically included gaps in the alignment, but in some cases gaps were excluded.

[0409] The main Reciprocal BLAST process consists of two rounds of BLAST searches; forward search and reverse search. In the forward search step, a reference polypeptide sequence, “polypeptide A,” from source species SA was BLASTed against all protein sequences from a species of interest. Top hits were determined using an E-value cutoff of 10⁻⁵ and a sequence identity cutoff of 35%. Among the top hits, the sequence having the lowest E-value was designated as the best hit, and considered a potential functional homolog or ortholog. Any other top hit that had a sequence identity of 80% or greater to the best hit or to the original reference polypeptide was considered a potential functional homolog or ortholog as well. This process was repeated for all species of interest.

[0410] In the reverse search round, the top hits identified in the forward search from all species were BLASTed against all protein sequences from the source species SA. A top hit from the forward search that returned a polypeptide from the aforementioned cluster as its best hit was also considered as a potential functional homolog.

[0411] Functional homologs were identified by manual inspection of potential functional homolog sequences. Representative functional homologs for SEQ ID Nos. 2, 11, 102, 32, 138, 149, 441, 172, 764, 389, 316, 200, 697, 239, 892, 922, and 693 are shown in FIGS. 1-16 and in the Sequence Listing.

### Example 22

### Determination of Functional Homologs by Hidden Markov Models

[0412] Hidden Markov Models (HMMs) were generated by the program HMMER 2.3.2. To generate each HMM, the default HMMER 2.3.2 program parameters, configured for glocal alignments, were used.

[0413] An HMM was generated using the sequences shown in FIG. 1 as input. These sequences were input into the model and the HMM bit score for each sequence is shown in the Sequence Listing. Additional sequences were input into the model, and the HMM bit scores for the additional sequences are shown in the Sequence Listing. The results indicate that these additional sequences are functional homologs of SEQ ID NO: 2.

[0414] HMMs were also generated using the sequences shown in FIGS. 2-16 as input. These sequences were input into the respective models and the corresponding HMM bit score for each sequence is shown in the Sequence Listing. Additional sequences were input into the models, and the HMM bit scores for the additional sequences are shown in the Sequence Listing. The results indicate that these additional sequences are functional homologs of the groups in FIGS. 2-16.

### REFERENCES

[0415] The following references are cited in the Specification. Each of the references from the patent and periodical literature cited herein is hereby expressly incorporated in its entirety by such citation.
[0416] Zhang et al. (2004) Plant Physiol. 135:615.
[0417] Salomon et al. (1984) EMBO J. 3:141.
[0418] Herrera-Estrella et al. (1983) EMBO J. 2:987.
[0419] Escudero et al. (1996) Plant J. 10:355.
[0420] Ishida et al. (1996) Nature Biotechnology 14:745.
[0421] May et al. (1995) Bio/Technology 13:486)

[0422] Armaleo et al. (1990) Current Genetics 17:97.
[0423] Smith. T. F. and Waterman, M. S. (1981) Adv. App. Math. 2:482.
[0424] Needleman and Wunsch (1970) J. Mol. Biol. 48:443.
[0425] Pearson and Lipman (1988) Proc. Natl. Acad. Sci. (USA) 85: 2444.
[0426] Yamauchi et al. (1996) Plant Mol. Biol. 30:321-9.
[0427] Xu et al. (1995) Plant Mol. Biol. 27:237.
[0428] Yamamoto et al. (1991) Plant Cell 3:371.
[0429] P. Tijessen, “Hybridization with Nucleic Acid Probes” In Laboratory Techniques in Biochemistry and Molecular Biology, P. C. vand der Vliet, ed., c. 1993 by Elsevier, Amsterdam.
[0430] Bonner et al., (1973) J. Mol. Biol. 81:123.
[0431] Sambrook et al., Molecular Cloning: A Laboratory Manual, Second Edition, Cold Spring Harbor Laboratory Press, 1989, New York.
[0432] Shizuya et al. (1992) Proc. Natl. Acad. Sci. USA, 89: 8794-8797.
[0433] Hamilton et al. (1996) Proc. Natl. Acad. Sci. USA, 93: 9975-9979.
[0434] Burke et al. (1987) Science, 236:806-812.
[0435] Sternberg N. et al. (1990) Proc Natl Acad Sci U S A., 87:103-7.
[0436] Bradshaw et al. (1995) Nucl Acids Res, 23: 4850-4856.
[0437] Frischauf et al. (1983) J. Mol Biol, 170: 827-842.
[0438] Huynh et al., Glover N M (ed) DNA Cloning: A practical Approach, Vol. 1 Oxford: IRL Press (1985).
[0439] Walden et al. (1990) Mol Cell Biol 1: 175-194.
[0440] Vissenberg et al. (2005) Plant Cell Physiol 46:192.
[0441] Husebye et al. (2002) Plant Physiol 128:1180.
[0442] Plesch et al. (2001) Plant J 28:455.
[0443] Weising et al. (1988) Ann. Rev. Genet., 22:421.
[0444] Christou (1995) Euphytica, v. 85, n. 1-3:13-27.
[0445] Newell (2000)
[0446] Griesbach (1987) Plant Sci. 50:69-77.
[0447] Fromm et al. (1985) Proc. Natl. Acad. Sci. USA 82:5824.
[0448] Paszkowski et al. (1984) EMBO J. 3:2717.
[0449] Klein et al. (1987) Nature 327:773.
[0450] Willmitzer, L. (1993) Transgenic Plants. In: iotechnology, A Multi-Volume Comprehensive treatise (H. J. Rehm, G. Reed, A. Puler, P. Stadler, eds., Vol. 2, 627-659, VCH Weinheim-New York-Basel-Cambridge).
[0451] Crit. Rev. Plant. Sci. 4:1-46.
[0452] Fromm et al. (1990) Biotechnology 8:833-844.
[0453] Cho et al. (2000) Planta 210:195-204.
[0454] Brootghaerts et al. (2005) Nature 433:629-633.
[0455] Lincoln et al. (1998) Plant Mol. Biol. Rep. 16:1-4.
[0456] Lacomme et al. (2001), “Genetically Engineered Viruses” (C. J. A. Ring and E. D. Blair, Eds). Pp. 59-99, BIOS Scientific Publishers, Ltd. Oxford, UK.
[0457] Huh G H, Damsz B, Matsumoto T K, Reddy M P, Rus A M, Ibeas J I, Narasimhan M L, Bressan R A, Hasegawa P M, 2002, Salt causes ion disequilibrium-induced programmed cell death in yeast and plants. Plant J 29(5):649-59.
[0458] Kang D K, Li X M, Ochi K, Horinouchi S, 1999, Possible involvement of cAMP in aerial mycelium formation and secondary metabolism in Streptomyces griseus. Microbiology, 145 (Pt 5):1161-72.
[0459] Kerk D, Bulgrien J, Smith D W, Gribskov M, 2003, Arabidopsis proteins containing similarity to the universal stress protein domain of bacteria. Plant Physiol. 131(3):1209-19.
[0460] Zhu J K, 2001, Cell signaling under salt, water and cold stresses. Curr Opin Plant Biol. 4(5):401-6.
[0461] Susstrunk U, Pidoux J, Taubert S, Ullmann A, Thompson C J, 1998, Pleiotropic effects of cAMP on germination, antibiotic biosynthesis and morphological development in Streptomyces coelicolor. Mol Microbiol 30(1):33-46.
[0462] Davletova S, Schlauch K, Coutu J, Mittler R., 2005, The zinc-finger protein Zat12 plays a central role in reactive oxygen and abiotic stress signaling in Arabidopsis. Plant Physiol 139(2):847-56.
[0463] Fowler S G, Cook D, Thomashow M F., 2005, Low temperature induction of Arabidopsis CBF1, 2, and 3 is gated by the circadian clock. Plant Physiol 137(3):961-8.
[0464] Nachin L, Nannmark U, Nystom T (2005) Differential roles of the universal stress proteins of Escherichia coli in oxidative stress resistance, adhesion and motility J Bacteriol 187(18):6265-72.
[0465] Rizhsky L, Davletova S, Liang H, Mittler R, 2004, The zinc finger protein Zat12 is required for cytosolic ascorbate peroxidase 1 expression during oxidative stress in Arabidopsis. J Biol Chem. 19; 279(12):11736-43.—
[0466] Vogel J T, Zarka D G, Van Buskirk H A, Fowler S G, Thomashow M F, 2005, Roles of the CBF2 and ZAT12 transcription factors in configuring the low temperature transcriptome of Arabidopsis. Plant J. 41(2):195-211.
[0467] Sanchez-Barrena M J, Martinez-Ripoll M, Zhu J K, Albert A., 2005, The structure of the Arabidopsis thaliana SOS3: molecular mechanism of sensing calcium for salt stress response J Mol Biol. 345(5):1253-64.
[0468] Griffen, H. G, and Gasson, M. J. (1995) The Gene (aroK) Encoding Shikimate Kinase I from E. Coli. DNA Seq., 5(3):195-197.
[0469] Susstrunk et al. (1998) Mol Microbiol, 30(1):33-46
[0470] Kang et al. (1999) Microbiology, 145:1161-72.
[0471] Sauter M, Rzewuski G, Marwedel T, Lorbiecke R (2002) The novel ethylene-regulated gene OsUsp1 from rice encodes a member of a plant protein family related to prokaryotic universal stress proteins. J Exp Bot 53 (379):2325-31.
[0472] Kasuga et al. (1999) Nature Biotech 17: 287-291.
[0473] Rus et al. (2001) PNAS 98:14150-14155.
[0474] Shi et al. (2000) PNAS 97:6896-6901.
[0475] Apse et al. (1999) Science 285:1256-1258.
[0476] Zhang et al. (2001) PNAS 98:12832-12836.
[0477] Berthomieu et al. (2003) EMBO J 22:2004-2014.
[0478] Ren et al. (2005) Nat Genet. 37:1029-30
[0479] Davletova et al (2005) Plant Physiol. 139:847-56

The application's sequence listing, which the Patent Office published only in electronic form, follows.

SEQUENCE LISTING (1195 sequences)

SEQ ID NO: 1 - DNA, 666 bp, Zea mays
  misc_feature: Ceres CLONE ID no.210210
  misc_feature: Inplanta Sequence
  misc_feature: Encodes the peptide sequence at SEQ ID NO. 2
ggtacctagaacatcctaatcgaaaaatcattagtagattccacaacgtatatcttagatagtttaattttgataatgggtccaagatatatcaccctatgcatcttcctagtacttgtcttacatggagatacaactttggcagaaacttgcaggcagtttgttaaatgggatccattctgctttagtgcgatgtgcaaggcaagttgttttatagagggaaaatcctccgatggttcctatgtaaaggggcacagatgtgaatcaaatggatatcacgctgtgtgtgtttgttttctgtgtaaaaattaggtatctaatgacatgcggatctatcttcttttgttcctctctgtcatctaggagtgtttgtctaaataattatatggtaaaatagttaactagtatgtttactattagagttatgtagcactagttaactagtcgttatttcttcaatttcttatatctagaaacatgtttttagttgtcaagcacttcaataatatatgtttgttttcctttattataaatttaaagagagtcgttgttagctttttgtctatagtcttgtttactcaagagttatatatatttgtaatgtgtcgataaatagtataattctacaggtacaatcacaagttcgttgctaaaaaaaaaaaaaaa

SEQ ID NO: 2 - protein, 78 aa, Zea mays
  misc_feature: Ceres CLONE ID no.210210
  misc_feature: Bit score of 223.3 for HMM based on sequences of FIGURE 1.
MGPRYITLCIFLVLVLHGDTTLAETCRQFVKWDPFCFSAMCKASCFIEGKSSDGSYVKGHRCESNGYHAVCVCFLCKN

SEQ ID NO: 3 - DNA, 500 bp, Zea mays
  misc_feature: Ceres CLONE ID no.218758
  misc_feature: Encodes the peptide sequence at SEQ ID NO. 4
atcattactccactccacattcgacaaaatatatcttagacaagttaagtttaacgataatggattcaagatatgttaccctatgcattttcttagtacttgccttacatggagatactactttggcagaaacttgcaggcagtatgttgaagggcagccattttgctttaaagcaatgtgcaaggcaaattgttttatggagggaaaattctctgatggttcttatgtaaagggttacagatgtgaatcaggtggattccactcggtgtgtgtttgccttttgtgcaaaaattagttatctaaagacaagcggatatatcttcttatgttcctatccattatttaggattatagtccaaataattatacaatagcttagttaaatagttttttatttatagacaaatgtagcactagttaactagttgtgattttttaaatttctcagctataaatcaggaaatattttttaacacttcaataatatatctttgttcgc

SEQ ID NO: 4 - protein, 78 aa, Zea mays
  misc_feature: Ceres CLONE ID no.218758
  misc_feature: Bit score of 186.3 for HMM based on sequences of FIGURE 1.
  misc_feature: Functional Homolog Of Ceres CLONE ID no. 210210 at SEQ ID NO. 2
MDSRYVTLCIFLVLALHGDTTLAETCRQYVEGQPFCFKAMCKANCFMEGKFSDGSYVKGYRCESGGFHSVCVCLLCKN

SEQ ID NO: 5 - DNA, 524 bp, Zea mays
  misc_feature: Ceres CLONE ID no.447215
  misc_feature: Encodes the peptide sequence at SEQ ID NO. 6
atcttacaacggtagctgcattgcatgcttgatcactcgcctcgctcgttgcatcttagataatttaattttgataatggattcaagatatatcaccctatgcatctttcttgtacttgtcttacatggagatacaactttggcagaaacctgcaagcagtttcctaaatggagtccactctgctttagcgcaatttgcaaggcaagttgttttatagagggaaagttctccgatggttactatgtaaaggggcatagatgttgttcaactggatatgaatacgtgtgtaattgtcttttgtgtaaaaattagttatctagtgacatgtgggactatctccttttgttcctatctgtcatctaggagtgctatctaaataattattcggtaaaatagttaactagtatgtttactgttagagttatgtagcactagttaactagtcattatttcgtcaatttcttatatctagaaacatggttttacttgccaagcatttcaataatatatgtttgttttccac

SEQ ID NO: 6 - protein, 78 aa, Zea mays
  misc_feature: Ceres CLONE ID no.447215
  misc_feature: Bit score of 170.1 for HMM based on sequences of FIGURE 1.
  misc_feature: Functional Homolog Of Ceres CLONE ID no. 210210 at SEQ ID NO. 2
MDSRYITLCIFLVLVLHGDTTLAETCKQFPKWSPLCFSAICKASCFIEGKFSDGYYVKGHRCCSTGYEYVCNCLLCKN

SEQ ID NO: 7 - protein, 81 aa, Oryza sativa subsp. japonica
  misc_feature: Public GI ID no.56202240
  misc_feature: Bit score of 214.6 for HMM based on sequences of FIGURE 1.
  misc_feature: Functional Homolog Of Ceres CLONE ID no. 210210 at SEQ ID NO. 2
MGERKAGICLVLVLLLSTLAQHAYAEQWCWYEVSVSPICAGFTCKFDCWFFAKVNKAKVQSHKCLGKGYKIKCLCQLCKNV

SEQ ID NO: 8 - DNA, 237 bp, Sorghum bicolor
  misc_feature: Ceres ANNOT ID no.6044037
  misc_feature: Encodes the peptide sequence at SEQ ID NO. 9
atggaggcgaaatatgttgttctatgcttcctcgtagtgcttgtcttacatggagatcctacttttgctgaaacttgcaggcaatttgttaaagtgcacccattctgctttaaggcttactgcaaggcaaattgttatttggagggaaaattctccgatggttcctatgcaaaggaatatcattgcttaggagatccaattcactccctatgcatttgcactttgtgcaaaaattag

SEQ ID NO: 9 - protein, 78 aa, Sorghum bicolor
  misc_feature: Ceres ANNOT ID no.6044037
  misc_feature: Bit score of 214.9 for HMM based on sequences of FIGURE 1.
  misc_feature: Functional Homolog Of Ceres CLONE ID no. 210210 at SEQ ID NO. 2
MEAKYVVLCFLVVLVLHGDPTFAETCRQFVKVHPFCFKAYCKANCYLEGKFSDGSYAKEYHCLGDPIHSLCICTLCKN

SEQ ID NO: 10 - DNA, 959 bp, Arabidopsis thaliana
  misc_feature: Ceres CLONE ID no.22538
  misc_feature: Inplanta Sequence
  misc_feature: Encodes the peptide sequence at SEQ ID NO. 11
gtggattgatgtgatatctccactgacgtaagggatgacgcacaatcccactatccttcgcaagacccttcctctatataaggaagttcatttcatttggagagaacacgggggactctggcctgcagggccatcaccactgcagtggtacctagaacatcctaatcgaaaactcttccaatttcgtttcgacatatttcgcgattcgtctaaggttttgttactgattgagaaaacatgggaggtgacaatgataatgacaaagacaaagggtttcatgggtatcctcccgctggatacccaccccctggggcttatccacccgctggatacccacaacaaggttaccctccaccacccggtgcttacccgcctgcaggttatcctccgggtgcctacccacctgcacctggtggttatcctccagcccctggttatggtggttatcctccagctcctggttatggaggttatcctcctgcacctggtcatggtggttaccctcctgctggctatcctgctcatcactcaggacacgcaggaggaattgggggtatgattgcaggtgctgcagctgcctatggagctcaccacgtagctcatagctctcacggtccttacggacatgctgcatatggtcacggttttggccatggtcatggctatggctatggtcatggtcatggtaagttcaagcatgggaagcacgggaagttcaagcatgggaagcatggaatgtttggaggaggcaagttcaagaagtggaagtgatctagttaataccttttgtgaatctgtctggactgaccaatgtttcaaataagccctaaacattatataagttgactttcgtcggttagattgctggttcgagttggaataattgaaacttaattagtatcaaatcttattgtatactttaaagctatcgttggctttataatgatagattctggttt

SEQ ID NO: 11 - protein, 177 aa, Arabidopsis thaliana
  misc_feature: Ceres CLONE ID no.22538
  misc_feature: Bit score of 264.4 for HMM based on sequences of FIGURE 2.
  misc_feature (15)..(19): Pfam Name: XYPPX Pfam Description: XYPPX repeat
  misc_feature (60)..(64): Pfam Name: XYPPX Pfam Description: XYPPX repeat
  misc_feature (69)..(73): Pfam Name: XYPPX Pfam Description: XYPPX repeat
  misc_feature (78)..(82): Pfam Name: XYPPX Pfam Description: XYPPX repeat
  misc_feature (87)..(91): Pfam Name: XYPPX Pfam Description: XYPPX repeat
MGGDNDNDKDKGFHGYPPAGYPPPGAYPPAGYPQQGYPPPPGAYPPAGYPPGAYPPAPGGYPPAPGYGGYPPAPGYGGYPPAPGHGGYPPAGYPAHHSGHAGGIGGMIAGAAAAYGAHHVAHSSHGPYGHAAYGHGFGHGHGYGYGHGHGKFKHGKHGKFKHGKHGMFGGGKFKKWK

SEQ ID NO: 12 - DNA, 901 bp, Gossypium hirsutum
  misc_feature: Ceres CLONE ID no.1918442
  misc_feature: Encodes the peptide sequence at SEQ ID NO. 13
atcttcatctttttcctataaatattgggtagaacaattatgataggtaactcatcctcaaacatcccccgcccctaaaaaatctcactcatataatttaaattcgaagaatctgctacaccaaaggtaaatcacaaaacccatttctcttccttacatcttttctttccttttcaacaattgcatcttttgctttcgatcccaaattctgggtttcctcttctgtccatcagtcaattcatactagttactcgaattcgttaattttaagtcgaagaaaaatgggaggtggtagggaaggcgaatcaagtgacaaagggctgttttctcatcttgctggctatgccgccggacattatcctccgcctggatcctaccctccacaaggatatcctcctcaaggatatcccccacaaggatacccaccggctggatatcctccaccagcgggatatcctccacatggcggatacccacctgcagggtatcctcctcatggaggataccctcatccacctcatggtggatatccaccagctggttatcctggacacggttcgcatggacctgggatgggaggattattagccggtgctggggctgcggctgctgctctttacggggctcaccatttgtcacatggagctcatcatcttgcacatgggggatactatggccatggtcacggaaaatttaaacatgggaaatttaagcacgggaaatttgggaagcggtggaagcatggcatgtttggtaaacataaggccaagttctttggcaggaagtggaagtaaatagtcccgtctcccatgtcccatacgaatcttatcatactagtatgctcttttaacagttactgacatggttgccctctaataaacatggatttgtttcgcttgtt

SEQ ID NO: 13 - protein, 170 aa, Gossypium hirsutum
  misc_feature: Ceres CLONE ID no.1918442
  misc_feature: Bit score of 257.6 for HMM based on sequences of FIGURE 2.
  misc_feature (36)..(40): Pfam Name: XYPPX Pfam Description: XYPPX repeat
  misc_feature (41)..(45): Pfam Name: XYPPX Pfam Description: XYPPX repeat
  misc_feature (51)..(55): Pfam Name: XYPPX Pfam Description: XYPPX repeat
  misc_feature (63)..(67): Pfam Name: XYPPX Pfam Description: XYPPX repeat
  misc_feature (82)..(86): Pfam Name: XYPPX Pfam Description: XYPPX repeat
  misc_feature: Functional Homolog Of Ceres CLONE ID no. 22538 at SEQ ID NO. 11
MGGGREGESSDKGLFSHLAGYAAGHYPPPGSYPPQGYPPQGYPPQGYPPAGYPPPAGYPPHGGYPPAGYPPHGGYPHPPHGGYPPAGYPGHGSHGPGMGGLLAGAGAAAAALYGAHHLSHGAHHLAHGGYYGHGHGKFKHGKFKHGKFGKRWKHGMFGKHKAKFFGRKWK

SEQ ID NO: 14 - DNA, 579 bp, Populus balsamifera subsp. trichocarpa
  misc_feature: Ceres ANNOT ID no.1469916
  misc_feature: Encodes the peptide sequence at SEQ ID NO. 15
atgggaggtggcaaggacaagtctgacaaagagtctacagacaagggactgttttcaaatcttgctggctatgctggtggacattaccctccaagcgcaccataccctccacatggttatccacaacagggatacccaccagcaggttaccccccccctggcggctacccaccttcgggctaccctcccccaggaggatacccaccagcaggttaccctcctcctggcggttaccctccccctggcggttacccaccccctggcggctaccctcctcctggtgcttaccctccagctggttaccctggcccatctgcttcacattattcagggcatggacctggaatggggacaatgttagctggaggtgctgctgctgctgcagttgcttacggggcccaccagatgtcccatggaggttcccatggctatggtcacggaggttaccatggctatggtcatggaaagtttaagcatggctatggtcatggaaagtttaagcatggcaagtttggcaagcgctggaagcatggcggatttggaaagcacaagggcaaattcttcaagagatggaagtga

SEQ ID NO: 15 - protein, 192 aa, Populus balsamifera subsp. trichocarpa
  misc_feature: Ceres ANNOT ID no.1469916
  misc_feature: Bit score of 287.4 for HMM based on sequences of FIGURE 2.
  misc_feature (44)..(48): Pfam Name: XYPPX Pfam Description: XYPPX repeat
  misc_feature (49)..(53): Pfam Name: XYPPX Pfam Description: XYPPX repeat
  misc_feature (60)..(64): Pfam Name: XYPPX Pfam Description: XYPPX repeat
  misc_feature (71)..(75): Pfam Name: XYPPX Pfam Description: XYPPX repeat
  misc_feature (89)..(93): Pfam Name: XYPPX Pfam Description: XYPPX repeat
  misc_feature: Functional Homolog Of Ceres CLONE ID no. 22538 at SEQ ID NO. 11
MGGGKDKSDKESTDKGLFSNLAGYAGGHYPPSAPYPPHGYPQQGYPPAGYPPPGGYPPSGYPPPGGYPPAGYPPPGGYPPPGGYPPPGGYPPPGAYPPAGYPGPSASHYSGHGPGMGTMLAGGAAAAAVAYGAHQMSHGGSHGYGHGGYHGYGHGKFKHGYGHGKFKHGKFGKRWKHGGFGKHKGKFFKRWK

SEQ ID NO: 16 - DNA, 923 bp, Brassica napus
  misc_feature: Ceres CLONE ID no.872124
  misc_feature: Encodes the peptide sequence at SEQ ID NO. 17
attatttacgaggaataaatgtccaattaggaatcatactcaaagtacgaggaccataagatcaaaatatattttattttggaaaccgtgccgcttaaggaaataaatctatggcttaagcaaacccccatcaatacatatctccaaatatcttctgttttgttttctgttccaatccagtttcgacattgtttcgcgattcgtctcgggttttgttttgttgattgagagaaaacatgggaggtgaggaagacaaagagaaagggttttttgggtacccacccgctggatacccgccgggtcctggggcttatccaccagctggatacccaccacaacaagcttaccctcccccaccacctggtgcctacccacctcaacctggttatcctccgggtgcatacccacctccacctggtgcctaccctcctgctcctggttatggtggttatcctcctgcgcctggtcatgctggttatcctcctgctggatatcctcctcatcactcaggacacgcagctggaatcgggggtatgattgcaggtgctgcagctgcctwcggagctcaccacatagctcatagctctcacggtccttacggacacgcagcatatggtcacggatttggacatggtcatggctatggctatggttatggtcatggtaagttcaagcacgggaagttcaagcatcacggaggcaagtttaaacatgggaggcatgggatgtttggaggaggtaagttcaagaagtggaagtgatctaaaaacctcttttaatcttatctctcgccggttcaagtttgacaattgaggctttaataatgattatgatatcacatgttgtactatgaagctattatatatggttttatgatattactgattctgtttttaatataatttcatatattatgcccytgt

SEQ ID NO: 17 - protein, 174 aa, Brassica napus
  misc_feature: Ceres CLONE ID no.872124
  misc_feature: Bit score of 267.3 for HMM based on sequences of FIGURE 2.
  misc_feature (18)..(22): Pfam Name: XYPPX Pfam Description: XYPPX repeat
  misc_feature (30)..(34): Pfam Name: XYPPX Pfam Description: XYPPX repeat
  misc_feature (36)..(40): Pfam Name: XYPPX Pfam Description: XYPPX repeat
  misc_feature (50)..(54): Pfam Name: XYPPX Pfam Description: XYPPX repeat
  misc_feature (55)..(59): Pfam Name: XYPPX Pfam Description: XYPPX repeat
  misc_feature: Functional Homolog Of Ceres CLONE ID no. 22538 at SEQ ID NO. 11
  misc_feature (108)..(108): Xaa is any aa, unknown, or other
MGGEEDKEKGFFGYPPAGYPPGPGAYPPAGYPPQQAYPPPPPGAYPPQPGYPPGAYPPPPGAYPPAPGYGGYPPAPGHAGYPPAGYPPHHSGHAAGIGGMIAGAAAAXGAHHIAHSSHGPYGHAAYGHGFGHGHGYGYGYGHGKFKHGKFKHHGGKFKHGRHGMFGGGKFKKWK

SEQ ID NO: 18 - DNA, 717 bp, Brassica napus
  misc_feature: Ceres CLONE ID no.1076554
  misc_feature: Encodes the peptide sequence at SEQ ID NO. 19
agtttcgacattgtttcgcgattcgtctcgggttttgttttgttgattgagagaaaacatgggaggtgaggaagacaaagagaaagggttttttgggtacccacccgctggatacccgccgggtcctggggcttatccaccagctggatacccaccacaacaagcttaccctcccccaccacctggtgcctacccacctcaacctggttatcctccgggtgcatacccacctccacctggtgcctaccctcctgctcctggttatggtggttatcctcctgcgcctggtcatgctggttatcctcctgctggatatcctcctcatcactcaggacacgcagctggaatcgggggtatgattgcaggtgctgcagctgcctacggagctcaccacatagctcatagctctcacggtccttacggacacgcagcatatggtcacggatttggacatggtcatggctatggctatggttatggtcatggtaagttcaagcacgggaagttcaagcatcacggaggcaagtttaaacatgggaggcatgggatgtttggaggaggtaagttcaagaagtggaagtgatctaaaaacctcttttaatcttatctctcgccggttcaagtttgacaattgaggctttaataatgattatgatatcacatgttgtactatgaagctattatatatggttttatgatattactgattctgttttt

SEQ ID NO: 19 - protein, 174 aa, Brassica napus
  misc_feature: Ceres CLONE ID no.1076554
  misc_feature: Bit score of 269.6 for HMM based on sequences of FIGURE 2.
  misc_feature (18)..(22): Pfam Name: XYPPX Pfam Description: XYPPX repeat
  misc_feature (30)..(34): Pfam Name: XYPPX Pfam Description: XYPPX repeat
  misc_feature (36)..(40): Pfam Name: XYPPX Pfam Description: XYPPX repeat
  misc_feature (50)..(54): Pfam Name: XYPPX Pfam Description: XYPPX repeat
  misc_feature (55)..(59): Pfam Name: XYPPX Pfam Description: XYPPX repeat
  misc_feature: Functional Homolog Of Ceres CLONE ID no. 22538 at SEQ ID NO. 11
MGGEEDKEKGFFGYPPAGYPPGPGAYPPAGYPPQQAYPPPPPGAYPPQPGYPPGAYPPPPGAYPPAPGYGGYPPAPGHAGYPPAGYPPHHSGHAAGIGGMIAGAAAAYGAHHIAHSSHGPYGHAAYGHGFGHGHGYGYGYGHGKFKHGKFKHHGGKFKHGRHGMFGGGKFKKWK

SEQ ID NO: 20 - DNA, 755 bp, Zea mays
  misc_feature: Ceres CLONE ID no.1362309
  misc_feature: Encodes the peptide sequence at SEQ ID NO. 21
gttccaatccagtttcgacattgtttcgcgattcgtctcgggttttgttttgttgattgagagaaaacatgggaggtgaggaagacaaagagaaagggttttttgggtacccacccgctggatacccgccgggtcctggggcttatccaccagctggatacccaccacaacaagcttaccctcccccaccacctggtgcctacccacctcaacctggttatcctccgggtgcatacccacctccacctggtgcctaccctcctgctcctggttatggtggttatcctcctgcgcctggtcatgctggttatcctcctgctggatatcctcctcatcactcaggacacgcagctggaatcgggggtatgattgcaggtgctgcagctgcctacggagctcaccacatagctcatagctctcacggtccttacggacacgcagcatatggtcacggatttggacatggtcatggctatggctatggttatggtcatggtaagttcaagcacgggaagttcaagcatcacggaggcaagtttaaacatgggaggcatgggatgtttggaggaggtaagttcaagaagtggaagtgatctaaaaacctcttttaatcttatctctcgccggttcaagtttgacaattgaggctttaataatgattatgatatcacatgttgtactatgaagctattatatatggttttatgatattactgattctgtttttaatataatttcatatattatgcccttgt

SEQ ID NO: 21 - protein, 174 aa, Zea mays; identical to SEQ ID NO: 19
  misc_feature: Ceres CLONE ID no.1362309
  misc_feature: Bit score of 269.6 for HMM based on sequences of FIGURE 2.
  misc_feature (18)..(22): Pfam Name: XYPPX Pfam Description: XYPPX repeat
  misc_feature (30)..(34): Pfam Name: XYPPX Pfam Description: XYPPX repeat
  misc_feature (36)..(40): Pfam Name: XYPPX Pfam Description: XYPPX repeat
  misc_feature (50)..(54): Pfam Name: XYPPX Pfam Description: XYPPX repeat
  misc_feature (55)..(59): Pfam Name: XYPPX Pfam Description: XYPPX repeat
  misc_feature: Functional Homolog Of Ceres CLONE ID no. 22538 at SEQ ID NO. 11

SEQ ID NO: 22 - DNA, 988 bp, Panicum virgatum
  misc_feature: Ceres CLONE ID no.1725271
  misc_feature: Encodes the peptide sequence at SEQ ID NO. 23
agaccccgcgcagcgcaggcggcacgcgtttccttgccgaatcctgcgagtacctagcctctccgccgcgttgcgtcctcgggtatatagccggggaaggaggcgccgccaaaccatcacgcgtcgcccacagaaacatcgctgagatcgggtacttggtttgctgatcgccggagttctcgtcgtcgttcggtagcttggggtaacaatgggaggcggcaaggacaaacatgacgagggtgacaaggggctcttctcaaacataatgcatggtgctgccggtggccatgggtacccgcatcagggataccctcctcaaggctacccaccaccacctggggcgtacccgcctccccctggggcatatcctcctccaccaggggcttaccccccagcacccggggcatacccgccacagcatgggtaccctcaaccgggcgggtaccctcaaccaggtggttacccgccacatggtggctacccccctgctggttatcccggctcatctcaccagggtcatggaagcagccattctggcatggggatggggacggttctagctggaggcgccgccgccgctgcagctgcttatgtagcacacaagctctctcatgggcatagcggacacggtggacacggggtctttggaggctatggccacggtgggcacggctacggcggtcacggcaagttcaagcatggtcacggccaccacggcaagttcaagcacggccacggaaaattcaagcatggcaagcatgggcacggcatgttcggcggcaagttcaagaagtggaagtgatgtgcacccaatgggttgatcatactaagcccctatgcaggcttccagaaattctgttgtcgggaatgcctttgcgatttatttagcagggtgatcgttcatcctttctatatgttcgggtattctagcctgtgtgcgagtgacaagatggtttgctaataagtaactgaataaccttgtggattc

SEQ ID NO: 23 - protein, 197 aa, Panicum virgatum
  misc_feature: Ceres CLONE ID no.1725271
  misc_feature: Bit score of 308.0 for HMM based on sequences of FIGURE 2.
  misc_feature (33)..(37): Pfam Name: XYPPX Pfam Description: XYPPX repeat
  misc_feature (38)..(42): Pfam Name: XYPPX Pfam Description: XYPPX repeat
  misc_feature (45)..(49): Pfam Name: XYPPX Pfam Description: XYPPX repeat
  misc_feature (52)..(56): Pfam Name: XYPPX Pfam Description: XYPPX repeat
  misc_feature (66)..(70): Pfam Name: XYPPX Pfam Description: XYPPX repeat
  misc_feature: Functional Homolog Of Ceres CLONE ID no. 22538 at SEQ ID NO. 11
MGGGKDKHDEGDKGLFSNIMHGAAGGHGYPHQGYPPQGYPPPPGAYPPPPGAYPPPPGAYPPAPGAYPPQHGYPQPGGYPQPGGYPPHGGYPPAGYPGSSHQGHGSSHSGMGMGTVLAGGAAAAAAAYVAHKLSHGHSGHGGHGVFGGYGHGGHGYGGHGKFKHGHGHHGKFKHGHGKFKHGKHGHGMFGGKFKKWK

SEQ ID NO: 24 - DNA, 756 bp, Panicum virgatum
  misc_feature: Ceres CLONE ID no.1721485
  misc_feature: Encodes the peptide sequence at SEQ ID NO. 25
ccgagatcggggacttggttggctgatcgccggagttctcgtcggcgggcggcaggttggggtaacaatgggaggcggcaaggacaagcatgacgagggtgacaaggggctcttctcaaacataatgcatggtgttgccggtggccatgggtacccgcatcagggataccctccgcaaggctacccaccaccacctggggcgtacccgcctccccctggggcatatcctcctccaccaggggcttaccccccagcacccggggcatacccgccacagcatgggtaccctcaaccgggtgggtaccctcaaccaggtggttacccgccacatggtggctacccccctgctggttatcccggctcatctcaccagggtcatggaagcagccattctggcatggggatggggacggttctagctggaggcgccgccgccgctgcagctgcttatggagcacacaagctctctcatgggcatagcggacacggtggacatggggtctttggaggctatggccacggtgggcacggctacggcggtcacggcaagttcaaacatggtcacggccaccacggcaagttcaagcacggccacggaaaattcaagcatggcaagcatgggcaccgcatgttcggcggcaagttcaagaagtggaagtgatgtgcacccaatggcttgatcatactaagcccctatgcacgcttccagaaattctgttgtccggaatgcctttgcgatgtatttagcagggggat

SEQ ID NO: 25 - protein, 197 aa, Panicum virgatum
  misc_feature: Ceres CLONE ID no.1721485
  misc_feature: Bit score of 304.9 for HMM based on sequences of FIGURE 2.
  misc_feature (33)..(37): Pfam Name: XYPPX Pfam Description: XYPPX repeat
  misc_feature (38)..(42): Pfam Name: XYPPX Pfam Description: XYPPX repeat
  misc_feature (45)..(49): Pfam Name: XYPPX Pfam Description: XYPPX repeat
  misc_feature (52)..(56): Pfam Name: XYPPX Pfam Description: XYPPX repeat
  misc_feature (66)..(70): Pfam Name: XYPPX Pfam Description: XYPPX repeat
  misc_feature: Functional Homolog Of Ceres CLONE ID no. 22538 at SEQ ID NO. 11
  misc_feature (123)..(123): Xaa is any aa, unknown, or other
  misc_feature (138)..(138): Xaa is any aa, unknown, or other
  misc_feature (139)..(139): Xaa is any aa, unknown, or other
  misc_feature (140)..(140): Xaa is any aa, unknown, or other
MGGGKDKHDEGDKGLFSNIMHGVAGGHGYPHQGYPPQGYPPPPGAYPPPPGAYPPPPGAYPPAPGAYPPQHGYPQPGGYPQPGGYPPHGGYPPAGYPGSSHQGHGSSHSGMGMGTVLAGGAAXAAAAYGAHKLSHGHXXXGGHGVFGGYGHGGHGYGGHGKFKHGHGHHGKFKHGHGKFKHGKHGHGMFGGKFKKWK

SEQ ID NO: 26 - DNA, 883 bp, Panicum virgatum
  misc_feature: Ceres CLONE ID no.1795080
  misc_feature: Encodes the peptide sequence at SEQ ID NO. 27
gaaccatcacgcgtcgcccacagaaacatcgcctgagatcggctacttggtttgctgatcgccggagttctcgtcgtcgttcggtagcttgggggaacaatgggaggcggcaaggacaagcatgacgagggtgacaaggggctcttctcaaacataatgcatggtgttgccggtggccaagggtacccgcatcagggataccctccgcaaggctacccgccaccacctggggcgtacccgcctccccctggggcgtatccttctccactaggggcttatcccccggcacccggggcatacccaccacagcatgggtaccctcaaccgggtgggtaccctcaaccgggtgggtaccctcaaccaggtggttaccctccacatggtggttatccccctgctggttatcccggctcatctcaccagggtcatggtagcagccatggtggcatggggatggggacggttctagctggaggcgccgccgccgctgcagctgcgtatggagcacacaagctctctcatgggcatagcggacaaggtggacatggggtcattggaggctatggccacggttacagccatggctacggcggtcacggcaagttcaagcatggtcacggccaccacggcaagttcaagcacggccatggcaaattcaagcatggcaagcatgggcacggcatgttcggcggcaagttcaagaagtggaagtgatgtgcacccaatggtttgatcatactaaactcctaagcaggcttccataacttctgttatcgggaatgcctttgcgatgtatttagcagggtgattgttcatccttcctctatatgtgtgacaagatggtttgctaataagtaactgaataaccttgtcgattccctgc

SEQ ID NO: 27 - protein, 204 aa, Panicum virgatum
  misc_feature: Ceres CLONE ID no.1795080
  misc_feature: Bit score of 295.8 for HMM based on sequences of FIGURE 2.
  misc_feature (33)..(37): Pfam Name: XYPPX Pfam Description: XYPPX repeat
  misc_feature (38)..(42): Pfam Name: XYPPX Pfam Description: XYPPX repeat
  misc_feature (45)..(49): Pfam Name: XYPPX Pfam Description: XYPPX repeat
  misc_feature (66)..(70): Pfam Name: XYPPX Pfam Description: XYPPX repeat
  misc_feature (96)..(100): Pfam Name: XYPPX Pfam Description: XYPPX repeat
  misc_feature: Functional Homolog Of Ceres CLONE ID no. 22538 at SEQ ID NO. 11
MGGGKDKHDEGDKGLFSNIMHGVAGGQGYPHQGYPPQGYPPPPGAYPPPPGAYPSPLGAYPPAPGAYPPQHGYPQPGGYPQPGGYPQPGGYPPHGGYPPAGYPGSSHQGHGSSHGGMGMGTVLAGGAAAAAAAYGAHKLSHGHSGQGGHGVIGGYGHGYSHGYGGHGKFKHGHGHHGKFKHGHGKFKHGKHGHGMFGGKFKKWK

SEQ ID NO: 28 - DNA, 884 bp, Panicum virgatum
  misc_feature: Ceres CLONE ID no.1771569
  misc_feature: Encodes the peptide sequence at SEQ ID NO. 29
ggaaccatcacgcgtcgcccacagaaacatcgcctgagatcggctacttggtttgctgatcgccggagttctcgtcgtcgttcggtagcttgggggaacaatgggaggcggcaaggacaagcatgacgagggtgacaaggggctcttctcaaacataatgcatggtgttgccggtggccaggggtacccgcatcagggataccctccgcaaggctacccgccaccacctggggcgtacccgcctccccctggggcgtatcctccaccaggggcttatcccctggcacccggggcatacccaccacagcatgggtaccctcaaccgggtgggtaccctcaaccaggtggttaccctccacatggtggttatccccctgctggttatcccggctcatctcaccagggtcatggtagcagccatggtggcatggggatggggacggttctagctggaggcaccgccgccgctgcagctgcgtatggagcacacaagctctctcatgggcatagcggacaaggtggacatggggtcattggaggctatggccacggttacggccagggctacggcggttacggccagggctacggcggtcacggcaagttcaagcatggtcacggccaccacggcaagttcaagcacggccatggcaaattcaagcatggcaagcatgggcacggcatgttcggcggcaagttcaagaagtggaagtgatgtgcacccaatggtttgatcatactaaactcctaagcaggcttccataacttctgttatcgggaatgcctttgcgatgtatttagcagggtgattgttcatccttcctctatatgtgtgacaagatggtttgctaataagtaactgaataaccttgtcgattccctgt

SEQ ID NO: 29 - protein, 204 aa, Panicum virgatum
  misc_feature: Ceres CLONE ID no.1771569
  misc_feature: Bit score of 291.2 for HMM based on sequences of FIGURE 2.
  misc_feature (33)..(37): Pfam Name: XYPPX Pfam Description: XYPPX repeat
  misc_feature (38)..(42): Pfam Name: XYPPX Pfam Description: XYPPX repeat
  misc_feature (45)..(49): Pfam Name: XYPPX Pfam Description: XYPPX repeat
  misc_feature (52)..(56): Pfam Name: XYPPX Pfam Description: XYPPX repeat
  misc_feature (65)..(69): Pfam Name: XYPPX Pfam Description: XYPPX repeat
  misc_feature: Functional Homolog Of Ceres CLONE ID no. 22538 at SEQ ID NO. 11
MGGGKDKHDEGDKGLFSNIMHGVAGGQGYPHQGYPPQGYPPPPGAYPPPPGAYPPPGAYPLAPGAYPPQHGYPQPGGYPQPGGYPPHGGYPPAGYPGSSHQGHGSSHGGMGMGTVLAGGTAAAAAAYGAHKLSHGHSGQGGHGVIGGYGHGYGQGYGGYGQGYGGHGKFKHGHGHHGKFKHGHGKFKHGKHGHGMFGGKFKKWK

SEQ ID NO: 30 - protein, 197 aa, Oryza sativa subsp. japonica
  misc_feature: Public GI ID no.115461767
  misc_feature: Bit score of 306.3 for HMM based on sequences of FIGURE 2.
  misc_feature (39)..(43): Pfam Name: XYPPX Pfam Description: XYPPX repeat
  misc_feature (46)..(50): Pfam Name: XYPPX Pfam Description: XYPPX repeat
  misc_feature (53)..(57): Pfam Name: XYPPX Pfam Description: XYPPX repeat
  misc_feature (60)..(64): Pfam Name: XYPPX Pfam Description: XYPPX repeat
  misc_feature (79)..(83): Pfam Name: XYPPX Pfam Description: XYPPX repeat
  misc_feature: Functional Homolog Of Ceres CLONE ID no. 22538 at SEQ ID NO. 11
MGGGKDKHDESDKGLFSNMMHGVAGGHGYPPHQGYPPQGYPPPPGAYPPPPGAYPPPPGAYPPPPGAYPPQHGYPQPGGYPPPGGYPQHGGYPPAGYPGSSGHQGGHGSSGGGHMGAMLAGGAAAAAAAYGAHKISSHGHGGHMGYGGHGGFGGYGHGYGGHHGGKFKHGKHGHHGKFKHGKHGHGMFGGGKFKKWK

SEQ ID NO: 31 - DNA, 612 bp, Glycine max
  misc_feature: Ceres CLONE ID no.547495
  misc_feature: Inplanta Sequence
  misc_feature: Encodes the peptide sequence at SEQ ID NO. 32
aattcagagagagcgaaacggcagcacgcgcaaaaatggtgaagtttctgaaaccaaacaaagccgtcatcgtccttcagggacgctacgccggcaaaaaagccgtgatagtgcgaaccttcgatgaaggcacgcgcgagcgcccctacgggcactgcttggtggcagggataaagaagtaccctgcgaaggtgatcaagaaggattcggccaagaagacggccaagaagtcgcgtgtgaaggcgttcgtgaagctcgtgaactaccagcacctcatgcccacgcgctacacgctcgatgtcgatttgaaggacgcggttacccccgacgtgctccaagccaaggataagaaggttactgctctcaaggagaccaagaagcgcctcgaggagaggttcaagactgggaagaatcggtggttcttcaccaagctcaggttctgagcataatattatgcatttttgttttcaaaatgtttttggatctcgctttgtttttcgtaattgatactttataatgatgtgttgagattagattttggttatattggatgtttaatgtggtttctggagatgataggataaagttgttcaaaaaaaaaaaaaaaaaaaa

SEQ ID NO: 32 - protein, 135 aa, Glycine max
  misc_feature: Ceres CLONE ID no.547495
  misc_feature: Bit score of 332.5 for HMM based on sequences of FIGURE 4.
  misc_feature (52)..(135): Pfam Name: Ribosomal_L27e Pfam Description: Ribosomal L27e protein family
  misc_feature (7)..(40): Pfam Name: KOW Pfam Description: KOW motif
MVKFLKPNKAVIVLQGRYAGKKAVIVRTFDEGTRERPYGHCLVAGIKKYPAKVIKKDSAKKTAKKSRVKAFVKLVNYQHLMPTRYTLDVDLKDAVTPDVLQAKDKKVTALKETKKRLEERFKTGKNRWFFTKLRF

SEQ ID NO: 33 - protein, 134 aa, Pyrobotrys stellata
  misc_feature: Public GI ID no.400991
  misc_feature: Bit score of 297.2 for HMM based on sequences of FIGURE 4.
  misc_feature (52)..(134): Pfam Name: Ribosomal_L27e Pfam Description: Ribosomal L27e protein family
  misc_feature (7)..(40): Pfam Name: KOW Pfam Description: KOW motif
  misc_feature: Functional Homolog Of Ceres CLONE ID no. 547495 at SEQ ID NO. 32
MVKFLKSGKVVVVLSGRFAGKKAVIVRNFDDGTSSRPYGHALVVGLQKEPRKVTKRQSQKKQAKKSTLKTFIKTVNYNHLMPTRYTLDVDFKGVAAEAQENPTKKVEARKECKKLLEEKFKTGKNRWFFTKLRF

SEQ ID NO: 34 - DNA, 620 bp, Gossypium hirsutum
  misc_feature: Ceres CLONE ID no.1808896
  misc_feature: Encodes the peptide sequence at SEQ ID NO. 35
acttagggtttttgggagaagagaatcagagccgcagctgccgccatcgccatggtgaagtttcttaaaccgaacaaggcagttatcgtcctccagggtcgatacgccggccgcaaagccgtcattgtcagatctttcgacgatggcacacgtgaccgcgcctatggccattgtttggttgcagggataaagaagtatccgagcaaggttatccgcaaggactccgcgaagaaaaccgccaagaagtcacgcgtcaagtgcttcatcaagctcgtcaattaccagcacctgatgcccacgcgctacaccctcgacgtggacttgaaagacgtggttaccgtcgatgctctccagaccaaggacaagaaagtggccgcttgtaaggcaactaaggagaggtttgaagagaggttcaagactgggaaaaacaggtggttctttactaagctcaggttttaagtgttttattggaacatgttttatgcttaagtagttttatcgaacaattttgaatttaatgacggattttgaatctgtttggataagatatttctgggttattatttttgttattttatggaacgtgatttgctcatttctataagaagtttaagcttttg

SEQ ID NO: 35 - protein, 135 aa, Gossypium hirsutum
  misc_feature: Ceres CLONE ID no.1808896
  misc_feature: Bit score of 336.3 for HMM based on sequences of FIGURE 4.
  misc_feature (52)..(135): Pfam Name: Ribosomal_L27e Pfam Description: Ribosomal L27e protein family
  misc_feature (7)..(40): Pfam Name: KOW Pfam Description: KOW motif
  misc_feature: Functional Homolog Of Ceres CLONE ID no. 547495 at SEQ ID NO. 32
MVKFLKPNKAVIVLQGRYAGRKAVIVRSFDDGTRDRAYGHCLVAGIKKYPSKVIRKDSAKKTAKKSRVKCFIKLVNYQHLMPTRYTLDVDLKDVVTVDALQTKDKKVAACKATKERFEERFKTGKNRWFFTKLRF

SEQ ID NO: 36 - DNA, 638 bp, Gossypium hirsutum
  misc_feature: Ceres CLONE ID no.1847455
  misc_feature: Encodes the peptide sequence at SEQ ID NO. 37
gagttagggttttgcgccagggcgagaatcaaagccgccgtcgccatggtgaagtttctaaagcccaacaaagctgtcattgtcctccaaggccgatacgccggacgcaaagctgtgatcgtaaaatccttcgacgacggcacacgtgaccgtccctatggccactgtttggtcgcggggataaaaaagtacccgagcaaggtcatcctcaaggactccgccaagaaaaccgccaagaaatcgcgcgtcaagtgcttcgtcaagctcgtgaactaccagcacctgatgcccacacgatacaccctcgacgtcgacttgaaagacaccgtcacagtcgacgcgcttcagaccaaggacaagaaagtagccacttgtaagactatcaaacaaaggctggaagagaggttcaaaacaggaaaaaacaggtggttctttaccaagcttaggttttaagtcttcctttccttttaacattttccgtagaacctcttatatcatttgcacttctcttggtgctgtacttattcagccttagatcgatacggaaaaaaagcttgagaattcgagtccttcgttgtttggccatttttgtatcatcatcgatgctatattgagttgaactttgttgtttctgctgc

SEQ ID NO: 37 - protein, 135 aa, Gossypium hirsutum
  misc_feature: Ceres CLONE ID no.1847455
  misc_feature: Bit score of 329.8 for HMM based on sequences of FIGURE 4.
  misc_feature (52)..(135): Pfam Name: Ribosomal_L27e Pfam Description: Ribosomal L27e protein family
  misc_feature (7)..(40): Pfam Name: KOW Pfam Description: KOW motif
  misc_feature: Functional Homolog Of Ceres CLONE ID no. 547495 at SEQ ID NO. 32
MVKFLKPNKAVIVLQGRYAGRKAVIVKSFDDGTRDRPYGHCLVAGIKKYPSKVILKDSAKKTAKKSRVKCFVKLVNYQHLMPTRYTLDVDLKDTVTVDALQTKDKKVATCKTIKQRLEERFKTGKNRWFFTKLRF

SEQ ID NO: 38 - protein, 117 aa, Gossypium hirsutum
  misc_feature: CERES CLONE ID no.100002370
  misc_feature: Bit score of 177.1 for HMM based on sequences of FIGURE 4.
  misc_feature (53)..(87): Pfam Name: Ribosomal_L27e Pfam Description: Ribosomal L27e protein family
  misc_feature (7)..(40): Pfam Name: KOW Pfam Description: KOW motif
  misc_feature: Functional Homolog Of Ceres CLONE ID no. 547495 at SEQ ID NO. 32
MVKFLKPNNAVIVLQCRYAGRKAVIVRSFDDGTRDRAYGHCVVAGIKKYPSNVIRKDSAKKTAKKSRVKCFIKLVNYQHLMPTRYTLRCGLETKWVTGQFSSKTNGKENLAGWLMET

SEQ ID NO: 39 - DNA, 408 bp, Populus balsamifera subsp. trichocarpa
  misc_feature: Ceres ANNOT ID no.1453365
  misc_feature: Encodes the peptide sequence at SEQ ID NO. 40
atggtgaagtttctcaaacccaacaaggccgtcatagtcctccaaggccgatatgctggtcgcaaggcagtgatcgtcaagcactttgatgatggaaccagagaccgcccctatggtcattgcttggtcgcagggatcaagaagtacccaagcaaggttataaagaaagactcggccaagaaaacagcaaagaaatcgagggtcaagtgtttcgttaaggttgttaactatcagcacctgatgcctactaggtatactttggatgtggatttgaaggaccttgttactcctgattgcttggcaactaaggataagaaagtcgtggcttgtaaggaaacaaagacaaggttcgaggagaggttcaagactgggaagaaccgttggtttttcaccaagctgaggttttga

SEQ ID NO: 40 - protein, 135 aa, Populus balsamifera subsp. trichocarpa
  misc_feature: Ceres ANNOT ID no.1453365
  misc_feature: Bit score of 331.1 for HMM based on sequences of FIGURE 4.
  misc_feature (52)..(135): Pfam Name: Ribosomal_L27e Pfam Description: Ribosomal L27e protein family
  misc_feature (7)..(40): Pfam Name: KOW Pfam Description: KOW motif
  misc_feature: Functional Homolog Of Ceres CLONE ID no. 547495 at SEQ ID NO. 32
MVKFLKPNKAVIVLQGRYAGRKAVIVKHFDDGTRDRPYGHCLVAGIKKYPSKVIKKDSAKKTAKKSRVKCFVKVVNYQHLMPTRYTLDVDLKDLVTPDCLATKDKKVVACKETKTRFEERFKTGKNRWFFTKLRF

SEQ ID NO: 41 - DNA, 408 bp, Populus balsamifera subsp. trichocarpa
  misc_feature: Ceres ANNOT ID no.1528012
  misc_feature: Encodes the peptide sequence at SEQ ID NO. 42
atggtgaagtttctcaagcccaacaaggccgtcataatcctccaaggccgctatgcaggtcgcaaagcagtgatcgtgaagcacttcgatgacggaacaagagaccgtccatatgggcactgtttagtggcaggaatcaagaagtacccaagcaaggttataaagaaagattctaccaagaaaacagccaagaaatcgagggtcaagtgttttatcaagcttgttaactaccaacatctgatgccgacaaggtatacattggatgtagatttgaaggatgctgtcactgcagatagtttgactactaaggataagaaagttactgcttgcaaggatacaaaggcaaggttcgaggagcgttttaagactggaaagaaccgttggttttttaccaagctgaggttttga

SEQ ID NO: 42 - protein, 135 aa, Populus balsamifera subsp. trichocarpa
  misc_feature: Ceres ANNOT ID no.1528012
  misc_feature: Bit score of 335.2 for HMM based on sequences of FIGURE 4.
  misc_feature (52)..(135): Pfam Name: Ribosomal_L27e Pfam Description: Ribosomal L27e protein family
  misc_feature (7)..(40): Pfam Name: KOW Pfam Description: KOW motif
  misc_feature: Functional Homolog Of Ceres CLONE ID no. 547495 at SEQ ID NO. 32
MVKFLKPNKAVIILQGRYAGRKAVIVKHFDDGTRDRPYGHCLVAGIKKYPSKVIKKDSTKKTAKKSRVKCFIKLVNYQHLMPTRYTLDVDLKDAVTADSLTTKDKKVTACKDTKARFEERFKTGKNRWFFTKLRF

SEQ ID NO: 43 - DNA, 408 bp, Populus balsamifera subsp. trichocarpa
  misc_feature: Ceres ANNOT ID no.1440596
  misc_feature: Encodes the peptide sequence at SEQ ID NO. 44
atggtgaagttcttgaagacaaacaaggccgtcataatcctgcaaggaaaatatgcaggtcgcaaaggagtaatcgtcaggtccttcgacgatggtacacgtgatcgcccgtacggccactgtttggttgcagggattaagaagtacccaagcaaggttatcaagaaggactcagccaaaaagactgccaagaaatcccgggtcaagtgcttcatcaagctagtgaactaccagcacctgatgcccacacgttacacgctggatgtggacttgaaagatgttgtgaccgctgattgtttgtcaaccaaggataagaagattactgcttgcaaggagacaaaggctaggttcgaggagcggtttaagacaggcaagaacaggtggttttttacaaagctgaggttttga

SEQ ID NO: 44 - protein, 135 aa, Populus balsamifera subsp. trichocarpa
  misc_feature: Ceres ANNOT ID no.1440596
  misc_feature: Bit score of 331.7 for HMM based on sequences of FIGURE 4.
  misc_feature (52)..(135): Pfam Name: Ribosomal_L27e Pfam Description: Ribosomal L27e protein family
  misc_feature (7)..(40): Pfam Name: KOW Pfam Description: KOW motif
  misc_feature: Functional Homolog Of Ceres CLONE ID no. 547495 at SEQ ID NO. 32
MVKFLKTNKAVIILQGKYAGRKGVIVRSFDDGTRDRPYGHCLVAGIKKYPSKVIKKDSAKKTAKKSRVKCFIKLVNYQHLMPTRYTLDVDLKDVVTADCLSTKDKKITACKETKARFEERFKTGKNRWFFTKLRF

SEQ ID NO: 45 - DNA, 426 bp, Populus balsamifera subsp. trichocarpa
  misc_feature: Ceres ANNOT ID no.1474581
  misc_feature: Encodes the peptide sequence at SEQ ID NO. 46
atggtgaagtttctcaagcccaacaaggccgtcataatcctccaaggccgctatgcaggtcgcaaagcagtgatcgtgaagcacttcgatgacggaacaagagaccgtccatatgggcactgtttagtggcaggaatcaagaagtacccaagcaaggttataaagaaagattctaccaagaaaacagccaagaaatcgagggtcaagtgttttatcaagcttgttaactaccaacatctgatgccgacaaggtatacattggatgtagatttgaaggatgctgtcactgcagatagtttgactactaaggataagaaagttactgcttgcaaggatacaaaggcaaggaatgtattcgtctcggcttccatgaaatggaaataccctagctgtaattttaaaggtgttgttttagggttgctctga

SEQ ID NO: 46 - protein, 141 aa, Populus balsamifera subsp. trichocarpa
  misc_feature: Ceres ANNOT ID no.1474581
  misc_feature: Bit score of 269.6 for HMM based on sequences of FIGURE 4.
  misc_feature (52)..(116): Pfam Name: Ribosomal_L27e Pfam Description: Ribosomal L27e protein family
  misc_feature (7)..(40): Pfam Name: KOW Pfam Description: KOW motif
  misc_feature: Functional Homolog Of Ceres CLONE ID no. 547495 at SEQ ID NO. 32
MVKFLKPNKAVIILQGRYAGRKAVIVKHFDDGTRDRPYGHCLVAGIKKYPSKVIKKDSTKKTAKKSRVKCFIKLVNYQHLMPTRYTLDVDLKDAVTADSLTTKDKKVTACKDTKARNVFVSASMKWKYPSCNFKGVVLGLL

SEQ ID NO: 47 - DNA, 631 bp, Arabidopsis thaliana
  misc_feature: Ceres CLONE ID no.15384
  misc_feature: Encodes the peptide sequence at SEQ ID NO. 48
agggttcatagcagccagagagagagagacaagtgagagggatctaccaaacgaagcaacaatggtgaagttcttgaagcagaacaaggccgtgatccttcttcaaggacgttacgccggaaagaaagccgtcatcatcaaatccttcgacgacggtaaccgtgatcgtccttacggacactgcctcgtcgccggactgaagaagtacccgagcaaagtcatccgcaaagactcagctaagaagacagctaagaaatctagggttaagtgtttcatcaagcttgttaattaccagcatctgatgcctactcgttacacactcgacgtggatctcaaggaagtggcgactcttgatgctcttcagagtaaggataagaaggttgctgctcttaaggaagctaaggctaagcttgaggagaggttcaagactggtaagaacagatggttctttaccaagctcaggttctgaagaaattttctatttcgtgaggaattcattttgagctttttgttatcgtgttttttagtttctagggttcatttcccatggtgaaaaatgtggatcctgttttggattgtggaagatgttttgttgaagtttggattatggatttgatcttttattttgact

SEQ ID NO: 48 - protein, 135 aa, Arabidopsis thaliana
  misc_feature: Ceres CLONE ID no.15384
  misc_feature: Bit score of 332.3 for HMM based on sequences of FIGURE 4.
  misc_feature (52)..(135): Pfam Name: Ribosomal_L27e Pfam Description: Ribosomal L27e protein family
  misc_feature (7)..(40): Pfam Name: KOW Pfam Description: KOW motif
  misc_feature: Functional Homolog Of Ceres CLONE ID no. 547495 at SEQ ID NO. 32
MVKFLKQNKAVILLQGRYAGKKAVIIKSFDDGNRDRPYGHCLVAGLKKYPSKVIRKDSAKKTAKKSRVKCFIKLVNYQHLMPTRYTLDVDLKEVATLDALQSKDKKVAALKEAKAKLEERFKTGKNRWFFTKLRF

SEQ ID NO: 49 - protein, 135 aa, Arabidopsis thaliana
  misc_feature: Public GI ID no.15233318
  misc_feature: Bit score of 326.4 for HMM based on sequences of FIGURE 4.
  misc_feature (52)..(135): Pfam Name: Ribosomal_L27e Pfam Description: Ribosomal L27e protein family
  misc_feature (7)..(35): Pfam Name: KOW Pfam Description: KOW motif
  misc_feature: Functional Homolog Of Ceres CLONE ID no. 547495 at SEQ ID NO. 32
MVKFLKQNKAVILLQGRYAGKKAVIIKSFDDGTSDRRYGHCLVAGLKKYPSKVIRKDSAKKTAKKSRVKCFIKLVNYQHLMPTRYTLDVDLKEVATLDALKSKDKKVTALKEAKAKLEERFKTGKNRWFFTKLRF

SEQ ID NO: 50 - DNA, 577 bp, Arabidopsis thaliana
  misc_feature: Ceres CLONE ID no.25631
  misc_feature: Encodes the peptide sequence at SEQ ID NO. 51
gcggtggtgagaaacaatggtgaagtttctgaagcagaacaaagcggtgatcctccttcaaggccgttacgccggcaaaaaggcagtgatcatcaaatccttcgatgacggaaccagtgaccgtcgttacggacactgcctcgtcgccggactgaagaagtacccgagcaaagtcatccgcaaagactccgcgaagaagacggcgaagaaatcaagagtgaaatgtttcatcaagctcgtgaattaccagcatctgatgcctactcgttacacgctcgatgtagatctgaaggaagtagcgactcttgatgctcttaagagtaaggataagaaggtgattgctttaaaggaagctaaagctaagcttgaggaacgtttcaagactggtaagaacaggtggttctttactaagctcaggttctgaagaagaacctttgagatttttatctatctatctactttttgtttagttctagaatgaatttggatcattgtttaagaccttttggtttggaattgattctggattttgtctcttacttataatcttttgctatattgatgcctcattttatac

SEQ ID NO: 51 - protein, 135 aa, Arabidopsis thaliana
  misc_feature: Ceres CLONE ID no.25631
  misc_feature: Bit score of 324.1 for HMM based on sequences of FIGURE 4.
  misc_feature (52)..(135): Pfam Name: Ribosomal_L27e Pfam Description: Ribosomal L27e protein family
  misc_feature (7)..(35): Pfam Name: KOW Pfam Description: KOW motif
  misc_feature: Functional Homolog Of Ceres CLONE ID no. 547495 at SEQ ID NO. 32
MVKFLKQNKAVILLQGRYAGKKAVIIKSFDDGTSDRRYGHCLVAGLKKYPSKVIRKDSAKKTAKKSRVKCFIKLVNYQHLMPTRYTLDVDLKEVATLDALKSKDKKVIALKEAKAKLEERFKTGKNRWFFTKLRF

SEQ ID NO: 52 - DNA, 582 bp, Arabidopsis thaliana
  misc_feature: Ceres CLONE ID no.1348650
  misc_feature: Encodes the peptide sequence at SEQ ID NO. 53
aggaagcgccgagagaaagacagagaagagagtgacaatggtgaaatgtatgaagccaggaaaagccgtgatccttttacaaggacgatacgccggtaaaaaggcggtgatcgtgaaatccttcgatgacggtaccgttgagaagaagtacggtcactgtctcgtcgccggattgaagaagtacccaagcaaagtcattcgcaaggattcggcaaagaagacggctaagaaatcgcgcgtgaaatgcttcttcaaggtcatcaattaccagcacgtgatgcctacgcgctacactcttgatttggatctgaagaacgttgtctccgccgacgcgatctcgtccaaggataagaaagtgacggctcttaaggaagcgaaggcgaagtttgaagagaggtttaagactggcaagaacagatggttcttcaccaagcttaggttttgaattctacagtttttaattttagttttaaagtttcaatttttatctaccatgaattgtttttgcttctggtttagctcaaggttatgttttgttctaaatttcagtaatatatattcaattttgatggttaaagtttt

SEQ ID NO: 53 - protein, 135 aa, Arabidopsis thaliana
  misc_feature: Ceres CLONE ID no.1348650
  misc_feature: Bit score of 305.1 for HMM based on sequences of FIGURE 4.
  misc_feature (52)..(135): Pfam Name: Ribosomal_L27e Pfam Description: Ribosomal L27e protein family
  misc_feature (7)..(35): Pfam Name: KOW Pfam Description: KOW motif
  misc_feature: Functional Homolog Of Ceres CLONE ID no. 547495 at SEQ ID NO. 32
MVKCMKPGKAVILLQGRYAGKKAVIVKSFDDGTVEKKYGHCLVAGLKKYPSKVIRKDSAKKTAKKSRVKCFFKVINYQHVMPTRYTLDLDLKNVVSADAISSKDKKVTALKEAKAKFEERFKTGKNRWFFTKLRF

SEQ ID NO: 54 - protein, 135 aa, Arabidopsis thaliana
  misc_feature: Public GI ID no.15225207
  misc_feature: Bit score of 302.1 for HMM based on sequences of FIGURE 4.
  misc_feature (52)..(135): Pfam Name: Ribosomal_L27e Pfam Description: Ribosomal L27e protein family
  misc_feature (7)..(35): Pfam Name: KOW Pfam Description: KOW motif
  misc_feature: Functional Homolog Of Ceres CLONE ID no. 547495 at SEQ ID NO. 32
MVKCMKPGKAVILLQGRYTGKKAVIVKSFDDGTVEKKYGHCLVAGLKKYPSKVIRKDSAKKTAKKSRVKCFFKVINYQHVMPTRYTLDLDLKNVVSADAISSKDKKVTALKEAKAKFEERFKTGKNRWFFTKLRF

SEQ ID NO: 55 - DNA, 535 bp, Arabidopsis thaliana
  misc_feature: Ceres CLONE ID no.26797
  misc_feature: Encodes the peptide sequence at SEQ ID NO. 56
agggttcatagcagccagagagagagagacaagtgagagggatctaccaaacgaagcaacaatggtgaagttcttgaagcagaacaaggccgtgatccttcttcaaggacgttacgccggaaaaaaagccgtcatcatcaaatccttcgacgacggtaaccgtgatcgtccttacggacactgcctcgtcgccggactgaagaagtacccgagcaaagtcatccgcaaagactcagctaagaagacagctaagaaatctagggttaagtgtttcatcaagcttgttaattaccagcatctgatgcctactcgttacacactcgacgtggatctcaagcaagtggcgactcttgatgctcttcagagtaaggataagaaggttgctgctcttaaggaagctaaggctaagcttgaggagaggttcaagactgtttctagggttcatttcccatggtgaaaaatgtggatcctgttttggattgtggaagatgttttgttgaagtttggattatggatttgatcttttattttgatc

SEQ ID NO: 56 - protein, 131 aa, Arabidopsis thaliana
  misc_feature: Ceres CLONE ID no.26797
  misc_feature: Bit score of 279.3 for HMM based on sequences of FIGURE 4.
  misc_feature (52)..(123): Pfam Name: Ribosomal_L27e Pfam Description: Ribosomal L27e protein family
  misc_feature (7)..(40): Pfam Name: KOW Pfam Description: KOW motif
  misc_feature: Functional Homolog Of Ceres CLONE ID no. 547495 at SEQ ID NO. 32
MVKFLKQNKAVILLQGRYAGKKAVIIKSFDDGNRDRPYGHCLVAGLKKYPSKVIRKDSAKKTAKKSRVKCFIKLVNYQHLMPTRYTLDVDLKQVATLDALQSKDKKVAALKEAKAKLEERFKTVSRVHFPW

SEQ ID NO: 57 - DNA, 773 bp, Glycine max
  misc_feature: Ceres CLONE ID no.475808
  misc_feature: Encodes the peptide sequence at SEQ ID NO. 58
agcggagcaatagcaacagagccagcgagagcaaaaccctagttcatccatcaccagtcgaggaagaagatggtgaagttccttaagcccaacaaggctgtcatcgtcctgcagggccgctacgccgggcgcaaggcggtgatcgtgaggaccttcgacgagggaaccagggagcgcccctacggccactgcctcgtcgccggaatcaagaagtaccccagcaaggtcatcaagaaggactccgccaagaagacggccaagaaatctagggttaaggcgttcgtgaagctcgtgaactaccagcacctcatgcccacgcgttacacgttcgacgtggatctcaaggatgctgttacccctgatgttctcggcaccaaggacaagaaggtcactgctctcaaggagaccaagaagcggttggaggagaggttcaagaccggcaagaataggtggttctttaccaaactcagattctgatctcgcaatcgtgaggttttattattagggcttttggaatgttgccttttttttaatattgtattcttgttttgcaaatcttatcaaaactattattctgctcttaagatttgtcgtcatcgtcttcttcttttgttaattaatgcatttgccttcttttaatttacgggggaaatgaatgcgagcatgttttgatactgaggaattcgcacaaatgggtctattcagataggaaattttctggttcgtttgacatgcactgtttgaatctaggttttaattgcgattttagccct

SEQ ID NO: 58 - protein, 135 aa, Glycine max
  misc_feature: Ceres CLONE ID no.475808
  misc_feature: Bit score of 328.9 for HMM based on sequences of FIGURE 4.
  misc_feature (52)..(135): Pfam Name: Ribosomal_L27e Pfam Description: Ribosomal L27e protein family
  misc_feature (7)..(40): Pfam Name: KOW Pfam Description: KOW motif
  misc_feature: Functional Homolog Of Ceres CLONE ID no. 547495 at SEQ ID NO. 32
MVKFLKPNKAVIVLQGRYAGRKAVIVRTFDEGTRERPYGHCLVAGIKKYPSKVIKKDSAKKTAKKSRVKAFVKLVNYQHLMPTRYTFDVDLKDAVTPDVLGTKDKKVTALKETKKRLEERFKTGKNRWFFTKLRF

SEQ ID NO: 59 - DNA, 629 bp, Glycine max
  misc_feature: Ceres CLONE ID no.1121669
  misc_feature: Encodes the peptide sequence at SEQ ID NO. 60
acttagcggcgataaagagaagaaaaaatggtgaagttcttgaagcagaacaaggccgtgatccttcttcaaggccggtacgccggaaagaaagccgtgatcatccgctccttcgacgacggaaaccgtgagcgtccttacggacactgcctcgtggccggactcaagaagtacccgagcaaggtcatccgcaaggactcggccaagaagacggcgaagaaatctcgggttaaatgtttcatcaaggtcgttaactaccagcatctgatgcctacccgttacaccctcgacgtggatctcaaggaagtcgctaccctcgaggctctttcttcaaaggacaagaaagtcgctgctctcaaggaggctaaggcgaagcttgaggaacgttttaagactggcaagaacaggtggttctttaccaagctcaggttctgaggacatttcgtatggagttttacagctttactttagtttccagggttcatttgttggacgacgtggatccccttttaatttgtgaaagactttttgttggaatttcgattctgaattttctatgttatgattatctaatgcagttttatttacgtcctcgtttcatttgaatgatatgcttatgttttatatct

SEQ ID NO: 60 - protein, 135 aa, Glycine max
  misc_feature: Ceres CLONE ID no.1121669
  misc_feature: Bit score of 329.9 for HMM based on sequences of FIGURE 4.
  misc_feature (52)..(135): Pfam Name: Ribosomal_L27e Pfam Description: Ribosomal L27e protein family
  misc_feature (7)..(40): Pfam Name: KOW Pfam Description: KOW motif
  misc_feature: Functional Homolog Of Ceres CLONE ID no. 547495 at SEQ ID NO. 32
MVKFLKQNKAVILLQGRYAGKKAVIIRSFDDGNRERPYGHCLVAGLKKYPSKVIRKDSAKKTAKKSRVKCFIKVVNYQHLMPTRYTLDVDLKEVATLEALSSKDKKVAALKEAKAKLEERFKTGKNRWFFTKLRF

SEQ ID NO: 61 - DNA, 658 bp, Glycine max
  misc_feature: Ceres CLONE ID no.1075841
  misc_feature: Encodes the peptide sequence at SEQ ID NO. 62
acttagcttttttttcagcggcgatacgaagacgaaggagagggatctatctacacaagtgaagcaacaatggtgaagttcttgaagcagaacaaggcagtgatcctcctccaaggccgatacgccgggaagaaggcggtgatcatccgatccttcgacgacggaaaccgtgagcgtccttacggacactgcctcgtcgccggactcaagaagtacccgagcaaggtcatccgcaaggactcggcgaagaagacggccaagaaatctagggttaagtgtttcatcaaggtcgtcaactaccagcatttgatgcctacgcgttacaccctcgacgtggatctcaaggaagtcgcgaccctcgaggctctggcttcaaaggacaagaaggtcgctgctctcaaggaggcgaaggctaagctcgaggaacgtttcaagaccgggaagaacagatggttctttaccaaactcaggttctgaaggaatcactgtcggaagaaacattttgagagtttttgttgttgcattttcttatccaatatttaaaacagcgtattattgttagtttctatggttcgtatggagaacaatgtggatcctgttttggattgtgaaagacttctgttggaaatttctgttctggagtttgattctctattgc

SEQ ID NO: 62 - protein, 135 aa, Glycine max
  misc_feature: Ceres CLONE ID no.1075841
  misc_feature: Bit score of 329.2 for HMM based on sequences of FIGURE 4.
  misc_feature (52)..(135): Pfam Name: Ribosomal_L27e Pfam Description: Ribosomal L27e protein family
  misc_feature (7)..(40): Pfam Name: KOW Pfam Description: KOW motif
  misc_feature: Functional Homolog Of Ceres CLONE ID no. 547495 at SEQ ID NO. 32
MVKFLKQNKAVILLQGRYAGKKAVIIRSFDDGNRERPYGHCLVAGLKKYPSKVIRKDSAKKTAKKSRVKCFIKVVNYQHLMPTRYTLDVDLKEVATLEALASKDKKVAALKEAKAKLEERFKTGKNRWFFTKLRF

SEQ ID NO: 63 - protein, 135 aa, Medicago truncatula
  misc_feature: Public GI ID no.92885255
  misc_feature: Bit score of 328.7 for HMM based on sequences of FIGURE 4.
  misc_feature (52)..(135): Pfam Name: Ribosomal_L27e Pfam Description: Ribosomal L27e protein family
  misc_feature (7)..(40): Pfam Name: KOW Pfam Description: KOW motif
  misc_feature: Functional Homolog Of Ceres CLONE ID no. 547495 at SEQ ID NO. 32
MVKFLKPNKAVIVLQGRYAGKKAVIVKNFDDGTRERAYGHCLVAGIKKYPAKVIKKDSAKKTAKKSRVKAFVKLVNYQHLMPTRYTLDVDLKEVVTTDVLQSKDKKVTALKEAKKRFEERFKTGKNRWFFTKLRF

SEQ ID NO: 64 - protein, 135 aa, Pisum sativum
  misc_feature: Public GI ID no.498902
  misc_feature: Bit score of 329.5 for HMM based on sequences of FIGURE 4.
  misc_feature (52)..(135): Pfam Name: Ribosomal_L27e Pfam Description: Ribosomal L27e protein family
  misc_feature (7)..(40): Pfam Name: KOW Pfam Description: KOW motif
  misc_feature: Functional Homolog Of Ceres CLONE ID no. 547495 at SEQ ID NO. 32
MVKFLKPNKAVILLQGRYAGKKAVIVKTFDDGTREKPYGHCLVAGIKKYPSKVIKKDSAKKTAKKSRVKAFVKLVNYQHLMPTRYTLDVDLKDAVVPDVLQSKDKKVTALKETKKSLEERFKTGKNRWFFTKLRF

SEQ ID NO: 65 - protein, 135 aa, Pisum sativum
  misc_feature: Public GI ID no.498906
  misc_feature: Bit score of 330.0 for HMM based on sequences of FIGURE 4.
  misc_feature (52)..(135): Pfam Name: Ribosomal_L27e Pfam Description: Ribosomal L27e protein family
  misc_feature (7)..(40): Pfam Name: KOW Pfam Description: KOW motif
  misc_feature: Functional Homolog Of Ceres CLONE ID no. 547495 at SEQ ID NO. 32
MVKFLKPNKAVILLQGRYAGKKAVIVKTFDDGTRDKPYGHCLVAGIKKYPSKVIKKDSAKKTAKKSRVKAFVKLVNYQHLMPTRYTLDVDLKDAVVPDVLQSKDKKVTALKETKKSLEERFKTGKNRWFFTKLRF

SEQ ID NO: 66 - protein, 135 aa, Pisum sativum
  misc_feature: Public GI ID no.464630
  misc_feature: Bit score of 326.3 for HMM based on sequences of FIGURE 4.
  misc_feature (52)..(135): Pfam Name: Ribosomal_L27e Pfam Description: Ribosomal L27e protein family
  misc_feature (7)..(40): Pfam Name: KOW Pfam Description: KOW motif
  misc_feature: Functional Homolog Of Ceres CLONE ID no. 547495 at SEQ ID NO. 32
MVKFLKPNKAVILLQGRYAGKKAVIVKTFDDGTREKPYGHCLVAGIKKFPSKVIKKDSAKKTAKKSRVKAFVKLVNYQHLMPTRYTLDVDLKDAVVPDVLQSKDKKVTALKETKKSLEERFKTGKNRWFFTKLRF

SEQ ID NO: 67 - protein, 135 aa, Pisum sativum
  misc_feature: Public GI ID no.498904
  misc_feature: Bit score of 321.8 for HMM based on sequences of FIGURE 4.
  misc_feature (52)..(135): Pfam Name: Ribosomal_L27e Pfam Description: Ribosomal L27e protein family
  misc_feature (7)..(40): Pfam Name: KOW Pfam Description: KOW motif
  misc_feature: Functional Homolog Of Ceres CLONE ID no. 547495 at SEQ ID NO. 32
MVKFLKPNKAVILLQGRYAGKKAVIVKTFDDGTREKPYGHCLVAGIKKYSSKVIKKDSAKKTAKKSRVKAFVKLVNYQHLMPTRYTLDVDLKDAVVPDVLQSKDKKVTALKETKKSVEERFKTGKNRWFFTKLRF

SEQ ID NO: 68 - protein, 135 aa, Panax ginseng
  misc_feature: Public GI ID no.8131701
  misc_feature: Bit score of 331.3 for HMM based on sequences of FIGURE 4.
  misc_feature (52)..(135): Pfam Name: Ribosomal_L27e Pfam Description: Ribosomal L27e protein family
  misc_feature (7)..(40): Pfam Name: KOW Pfam Description: KOW motif
  misc_feature: Functional Homolog Of Ceres CLONE ID no. 547495 at SEQ ID NO. 32
MVKVLKPNKAVIVLNGRYAGRKSVIIKSFDEGTRDRPYGHCLVAGISKYPKKVIRKDSAKKTAKKSRVKAFIKLVNCNHIMPTRYTLDVDLKDVVTVDCLQSRDKKVTAAKETKARLEERFKTGKNRWFFTKLRF

SEQ ID NO: 69 - protein, 138 aa, Solanum tuberosum
  misc_feature: Public GI ID no.730547
  misc_feature: Bit score of 307.0 for HMM based on sequences of FIGURE 4.
  misc_feature (52)..(138): Pfam Name: Ribosomal_L27e Pfam Description: Ribosomal L27e protein family
  misc_feature (7)..(40): Pfam Name: KOW Pfam Description: KOW motif
  misc_feature: Functional Homolog Of Ceres CLONE ID no. 547495 at SEQ ID NO. 32
MEKFLKPNKAVILLQGKYAGRKAVIVRAFDEGTRDRPYGHCLVAGISRYPKKVIRKDSAKKAGKKSRVKAFIKLVNYNHIMPTRYTLDEDLKDVVKDVVNADVLQARDKKVTARRTKARLAERFKTGKNRWFFTKLRF

SEQ ID NO: 70 - DNA, 683 bp, Triticum aestivum
  misc_feature: Ceres CLONE ID no.567641
  misc_feature: Encodes the peptide sequence at SEQ ID NO. 71
tttttttctccctcccacagcccacagacccctcccctcccctcccctcccccaacccaccggcggcggcgcagcgcagcttgaggaaggaagcgaagatggtgaagttcctgaagcccggcaaggcggtgatcctgctgcagggcaggtacgcggggaagaaggcggtgatcgtgcgcgtgttcgaggagggcacccgcgaccgcccgtacgggcactgcctcgtcgccgggctggccaagtacccgaagaaggtgatccgcaaggactcggccaagaagacggccaagaagtcccgcgtcaaggtgttcctcaagctcgtcaacttcacccatctcatgcccacccgctataccctcgacgtcgacctcaaggaggtggcctccggcgcgcccgactccctcacctccaaggacaagaaggtgggcgccgccaaggccgccaaggccaagctcgaggagaggttcaagaccggcaagaacaggtggttcttcaccaagctccgcttctaggccggccggccgcgccagggcggtctctgccgttattactacccgaaccctttacatttttagttgcttgttatcggtgactgttgctgcgcttaaggtgtcctgttttggtattgcccatgaagaagactctgtgtttagcttggatcttatgagatatgatgatgtttc

SEQ ID NO: 71 - protein, 137 aa, Triticum aestivum
  misc_feature: Ceres CLONE ID no.567641
  misc_feature: Bit score of 316.5 for HMM based on sequences of FIGURE 4.
  misc_feature (52)..(137): Pfam Name: Ribosomal_L27e Pfam Description: Ribosomal L27e protein family
  misc_feature (7)..(40): Pfam Name: KOW Pfam Description: KOW motif
  misc_feature: Functional Homolog Of Ceres CLONE ID no. 547495 at SEQ ID NO. 32
MVKFLKPGKAVILLQGRYAGKKAVIVRVFEEGTRDRPYGHCLVAGLAKYPKKVIRKDSAKKTAKKSRVKVFLKLVNFTHLMPTRYTLDVDLKEVASGAPDSLTSKDKKVGAAKAAKAKLEERFKTGKNRWFFTKLRF

SEQ ID NO: 72 - DNA, 640 bp, Triticum aestivum
  misc_feature: Ceres CLONE ID no.1329143
  misc_feature: Encodes the peptide sequence at SEQ ID NO. 73
aaatttcccagaccacccaaacccacacaacccactcggcggcggcgacggcggcggcggcggagcacgcgaagatggtgaagttcctgaagccgggcaaggcggtgatccttctccagggtcggttcgccggccggaaggcggtcattgtgcgcgttttcgaggagggcacgcgcgaccgcccctacggccactgcctcgtcgccggcctagccaagtaccccaagaaggtgatccgtaaggactcggccaagaagacggcgaagaagtcgcgcgtgaagtgcttcctgaagctggtcaacttcacccacatcatgcccacccgctacaccctggatgtcgacttcaaggacgtggcctccggcgggcccgacgccctcgccacccgcgacaagaaggtcgcctcctgcaaggccgccaaggcacgtctcgaggagaggttcaagaccggcaagaacaggtggttcttcaccaagctccgcttctaggagcagagcgtctttacaatactagtattccttgttcttgcaatcaatagcacactgagctatctctatcactgtttttgtattgtccatgaggattttgtggttagtatggatctcggagagagtttaattaaggcatgatgatgatgatg

SEQ ID NO: 73 - protein, 137 aa, Triticum aestivum
  misc_feature: Ceres CLONE ID no.1329143
  misc_feature: Bit score of 321.1 for HMM based on sequences of FIGURE 4.
  misc_feature (52)..(137): Pfam Name: Ribosomal_L27e Pfam Description: Ribosomal L27e protein family
  misc_feature (7)..(40): Pfam Name: KOW Pfam Description: KOW motif
  misc_feature: Functional Homolog Of Ceres CLONE ID no. 547495 at SEQ ID NO. 32
MVKFLKPGKAVILLQGRFAGRKAVIVRVFEEGTRDRPYGHCLVAGLAKYPKKVIRKDSAKKTAKKSRVKCFLKLVNFTHIMPTRYTLDVDFKDVASGGPDALATRDKKVASCKAAKARLEERFKTGKNRWFFTKLRF

SEQ ID NO: 74 - DNA, 688 bp, Triticum aestivum
  misc_feature: Ceres CLONE ID no.554893
  misc_feature: Encodes the peptide sequence at SEQ ID NO. 75
atttcccagaccacccaatcccacacatcccactcggcggcggcggcggcggcggagcacgcgaagatggtgaagttcctgaagaccggcaaggcggtgatccttctccagggccggttcgccggccggaaggcggtcattgtgcgcgttttcgaggagggcacacgcgaccgcccctacggccactgcctcgtcgccggcctagccaagtaccccaagaaggtgatccgcaaggactcggccaagaagacggcgaagaagtcgcgcgtgaagtgcttcctgaagctggtcaacttcacccacatcatgcccacccgctacaccctggacgtcgacttcaaggacgtcgcctccggcgggcccgacgccctcgccacccgcgacaagaaggtcgcctcctgcaaggccgccaaggcacgtctcgaggagaggttcaagaccggcaagaacaggtggttcttcaccaagctccgcttctaggagcagagcgtctttacaatacttattagtagttccttgttcttgcaatcaatagcacactgagctatctctatcactgtttttgtattgtccatgaggattttgtggttagtatggatctcggagagagtttaattaaggcatgatgatgatgatgttccatgtgttaaatcatgctaaatgatgcacatggttgcaattttgttat

SEQ ID NO: 75 - protein, 137 aa, Triticum aestivum
  misc_feature: Ceres CLONE ID no.554893
  misc_feature: Bit score of 318.5 for HMM based on sequences of FIGURE 4.
  misc_feature (52)..(137): Pfam Name: Ribosomal_L27e Pfam Description: Ribosomal L27e protein family
  misc_feature (7)..(40): Pfam Name: KOW Pfam Description: KOW motif
  misc_feature: Functional Homolog Of Ceres CLONE ID no. 547495 at SEQ ID NO. 32
MVKFLKTGKAVILLQGRFAGRKAVIVRVFEEGTRDRPYGHCLVAGLAKYPKKVIRKDSAKKTAKKSRVKCFLKLVNFTHIMPTRYTLDVDFKDVASGGPDALATRDKKVASCKAAKARLEERFKTGKNRWFFTKLRF

SEQ ID NO: 76 - DNA, 450 bp, Triticum aestivum
  misc_feature: Ceres CLONE ID no.555540
  misc_feature: Encodes the peptide sequence at SEQ ID NO. 77
tttttttcccccgcacacaacccacaacccctccccaacccaccaccggcggcggcgcagcgcgaggaagaggaagcgaagatggtgaagttcctgaagccgggcaaggcggtgatcctgctgcagggcaggtacgccgggaagaaggcggtgatcgtgcgcgtgttcgaggagggcacccgcgaccgcccctacgggcactgcctcgtcgccggcctggccaagtacccgaagaaggtgatccgcaaggactcggccaagaagacggccaagaagtcccgcgtcaaggtgttcctcaagctcgtcaacttcacccacctcatgcccacccgctacaccctcgacgtcgacctcaaggaggtggcctccggcgcgcccgactccctcacctccaaggacaagaaggtgggcgccgccaaggccgccaaggccaagctcgaggagcggttc

SEQ ID NO: 77 - protein, 137 aa, Triticum aestivum
  misc_feature: Ceres CLONE ID no.555540
  misc_feature: Bit score of 307.6 for HMM based on sequences of FIGURE 4.
  misc_feature (52)..(137): Pfam Name: Ribosomal_L27e Pfam Description: Ribosomal L27e protein family
  misc_feature (7)..(40): Pfam Name: KOW Pfam Description: KOW motif
  misc_feature: Functional Homolog Of Ceres CLONE ID no. 547495 at SEQ ID NO. 32
  misc_feature (127)..(127): Xaa is any aa, unknown, or other
  misc_feature (133)..(133): Xaa is any aa, unknown, or other
  misc_feature (134)..(134): Xaa is any aa, unknown, or other
MVKFLKPGKAVILLQGRYAGKKAVIVRVFEEGTRDRPYGHCLVAGLAKYPKKVIRKDSAKKTAKKSRVKVFLKLVNFTHLMPTRYTLDVDLKEVASGAPDSLTSKDKKVGAAKAAKAKLEERFKTGXNRWFFXXLRF

SEQ ID NO: 78 - DNA, 723 bp, Zea mays
  misc_feature: Ceres CLONE ID no.1450693
  misc_feature: Encodes the peptide sequence at SEQ ID NO. 79
ggcgataaacaagacgaaggagagggatctacacaagtgaagcaacaatggtgaagttcttgaagcagaacaaggcagtgatcctcctccaaggccgatacgccgggaagaaggcggtgatcatccgttccttcgacgacggaaaccgcgagcgtccttacgggcactgcctcgttgccgggctcaagaagtaccccagcaaggtcatccgcaaggactcagcgaagaagacggcgaagaaatctagggttaagtgtttcatcaaggtcgtcaactaccagcatctgatgcctacgcgttacaccctcgatgtggatctcaaggaagtcgcgaccctcgaggctctgtcttcaaaggacaagaaggtcgctgctctcaaggaggctaaggctaagctcgaggagcgtttcaagaccgggaagaacagatggttctttaccaaactcaggttctgaaggaatcactgtcggaagaaacattctgagcttattttgttgtttcattttcttatccaatatttaaaacagcgtattattgttagtttctatggttcatatggagaacaatgtggatccttttttgggttgtgaaagacttttgttggaaatttctgttctggagtttgattctctatggcattttgattacctctttgcttccattgaatgattttgctttggattttgtgataatttgagtattagtaatgactaccttacgctt

SEQ ID NO: 79 - protein, 135 aa, Zea mays; identical to SEQ ID NO: 60
  misc_feature: Ceres CLONE ID no.1450693
  misc_feature: Bit score of 329.9 for HMM based on sequences of FIGURE 4.
  misc_feature (52)..(135): Pfam Name: Ribosomal_L27e Pfam Description: Ribosomal L27e protein family
  misc_feature (7)..(40): Pfam Name: KOW Pfam Description: KOW motif
  misc_feature: Functional Homolog Of Ceres CLONE ID no. 547495 at SEQ ID NO. 32

SEQ ID NO: 80 - DNA, 1136 bp, Zea mays
  misc_feature: Ceres CLONE ID no.292350
  misc_feature: Encodes the peptide sequence at SEQ ID NO. 81
atcgagagcctaggaagtgagacgagcctgcagattccggtgaggtcaggcgccctgcgcctgctgttgagggagagcgagggacacccaccgccaccgtgtgcatctgtgtcgtgaggagagagtgcggtggttcgccgaacagcgaaggatccgtgcgcccccccatatctggccttcatcgccgatttggagtctgcgggtggtcgagggcgctcggccgaacgtgtggagctccgttgtagagagaagttgagggatggatcgcaggactgctatgtgctcgtcgcggtggtgaacggaagtcttctcggcgtccaatttggtggtggcaggggcggtgctgggcgagccctcgccggacatcgcactccatggcagaatctgtgccaccatgtgccgtgaatcatgctgctgcgcaccgtgggcagccatgcctgtgcttcgtgtcatggagaagaacaggtggttcaagaggagccgcatatcgaggagttcgattcgatctaggtggcgtctcctcttgacacacctcccaaaccctacactcccggcggcggcggcggcggcgcagcagcggcagcagcatccgaagatggtgaagttcctcaagcccggcaaggccgttatcctcctccagggccgcttcgccggcaggaaggcagttatcgtgcgcgtgttcgaggagggcacccgcgaccgcccctatggccactgcctcgtcgcaggcctcgccaagtacccaaagaaggtgatccgcaaggactccgccaagaagactgcgaagaagtcgcgcgtcaagtgcttcatcaagctcgtcaacttcactcacctcatgcccacccgctacaccctcgacgtcgatttcaaggatgtcgccaccggtgggcccgacgcactctctacccacgacaagaaggtcgccgcctgcaagacggccaaagcgcgccttgaggagaggttcaagaccggcaagaacaggtggttctttaccaagctccgcttctagatgctcggcctcccgaatagtcctgctttagctgtcgatttgttgtatcggacacactccatctctgttttcgtattaccatgaatatttcgtgtttagtcctggggctctcagagataaatttgcc

SEQ ID NO: 81 - protein, 137 aa, Zea mays
  misc_feature: Ceres CLONE ID no.292350
  misc_feature: Bit score of 323.9 for HMM based on sequences of FIGURE 4.
  misc_feature (52)..(137): Pfam Name: Ribosomal_L27e Pfam Description: Ribosomal L27e protein family
  misc_feature (7)..(40): Pfam Name: KOW Pfam Description: KOW motif
  misc_feature: Functional Homolog Of Ceres CLONE ID no. 547495 at SEQ ID NO. 32
MVKFLKPGKAVILLQGRFAGRKAVIVRVFEEGTRDRPYGHCLVAGLAKYPKKVIRKDSAKKTAKKSRVKCFIKLVNFTHLMPTRYTLDVDFKDVATGGPDALSTHDKKVAACKTAKARLEERFKTGKNRWFFTKLRF

SEQ ID NO: 82 - DNA, 982 bp, Zea mays
  misc_feature: Ceres CLONE ID no.1283569
  misc_feature: Encodes the peptide sequence at SEQ ID NO. 83
gatttgacccatctcccaacccctacactcccggcggcggcgcaggagcagcagcaccagcacccgaggatggtgaagttcctcaagcccggcaaggccgtgatcctcctgcagggccggttcgccggcaggaaggcggtgatcgtgcgcgtgttcgaggagggcacccgcgaccgcccctacggccactgcctcgtcgccggcctcgccaagtaccccaagaaggtggtccgcagggactcggccaagaagacggcgaagaagtcgcgcgtcaagtgcttcatcaagctcgtcaacttcacccacctcatgcccacccgctacaccctcgacgtcgacttcaaggacgtggccaccggcgggcccgacgcgctctccacccgcgacaagaaggtcgccgcatgcaaggccgccaaggcgcgcctcgaggagaggttcaagaccggcaagaacaggtggttctttaccaagctccgcttctagatggtcggcgtcccgaatggtgaccgtcggtttcttgtatgggacacactccaagccatgtctcttttcgtattgccatgaagacttcttcgtgtttagtcctggggctctcaggtatattgtgcgtgtgtacttcgaatgtttggtcttggagtcctactgaattgatgaatgttcaatttatgtcttcaggattaacagcgaatattgtttacaatcttatttatcccattggttagtttgttaaacttttaatattgagttgattgtgaactgtcatagtagcctatgaaagtactgtcattgctgatacttatcttgcttcactctatttgcccactcaagtagtcatttgtcctctcaaataggcattcaaggacattgttacatgagtgtcctgctttccattatcgtttagtaagaatttctctcctggcccttgtaataatactgttgttttacactgtagacatcactgcagagtttagtagaacatatg

SEQ ID NO: 83 - protein, 137 aa, Zea mays
  misc_feature: Ceres CLONE ID no.1283569
  misc_feature: Bit score of 324.0 for HMM based on sequences of FIGURE 4.
  misc_feature (52)..(137): Pfam Name: Ribosomal_L27e Pfam Description: Ribosomal L27e protein family
  misc_feature (7)..(40): Pfam Name: KOW Pfam Description: KOW motif
  misc_feature: Functional Homolog Of Ceres CLONE ID no. 547495 at SEQ ID NO. 32
MVKFLKPGKAVILLQGRFAGRKAVIVRVFEEGTRDRPYGHCLVAGLAKYPKKVVRRDSAKKTAKKSRVKCFIKLVNFTHLMPTRYTLDVDFKDVATGGPDALSTRDKKVAACKAAKARLEERFKTGKNRWFFTKLRF

SEQ ID NO: 84 - DNA, 651 bp, Zea mays
  misc_feature: Ceres CLONE ID no.273754
  misc_feature: Encodes the peptide sequence at SEQ ID NO. 85
gtttccctcttccccccactacccaaacccaacaggcggcgcagcagcatcgccaccaccgtccaaagatggtgaagttcctcaagcccggcaaggccgttatcctcctccagggccggttcgccggccggaaggccgtgatcgtgcgcgttttcgaggagggcacccgtgatcgtccctacgggcactgcctcgtcgcgggcctcgccaagtaccccaagaaggtgatccgcaaggactccgccaagaagacggccaagaagtcccgcgtcaagtgcttcatcaagctcgtcaacttcacgcacctcatgcccacccgctacaccctcgacgtcgacttcaaggacgtcgcatcgggcgggcccgacgcgctctccacccgggacaagaaggtcgaagcctgcaaggccgccaaggcgcgcctcgaggagaggttcaagaccggcaagaacaggtggttctttaccaaactccgcttctagacgtcgggcgtccctcatagtgtctgatttagttgtcaatttcttgtacctgaaaccctttaaggtatctctgttttgctatttccatgaaggcttcgtgcttggtatggatcttggagaggattttgttaaaaacatgtcgatgatgttaaattatgccaaagcacgc

SEQ ID NO: 85 - protein, 137 aa, Zea mays
  misc_feature: Ceres CLONE ID no.273754
  misc_feature: Bit score of 325.8 for HMM based on sequences of FIGURE 4.
  misc_feature (52)..(137): Pfam Name: Ribosomal_L27e Pfam Description: Ribosomal L27e protein family
  misc_feature (7)..(40): Pfam Name: KOW Pfam Description: KOW motif
  misc_feature: Functional Homolog Of Ceres CLONE ID no. 547495 at SEQ ID NO. 32
MVKFLKPGKAVILLQGRFAGRKAVIVRVFEEGTRDRPYGHCLVAGLAKYPKKVIRKDSAKKTAKKSRVKCFIKLVNFTHLMPTRYTLDVDFKDVASGGPDALSTRDKKVEACKAAKARLEERFKTGKNRWFFTKLRF

SEQ ID NO: 86 - DNA, 489 bp, Zea mays
  misc_feature: Ceres CLONE ID no.376108
  misc_feature: Encodes the peptide sequence at SEQ ID NO. 87
accctattaatcctcgtccctctcgcgcacagcgctccaatttcctccacctcccgaaccctaccggcggcgcagcagcatcacaaccaccacccgaagatggtgaagtttctgaagcccggcaaggccgtaatcctcctccagggcagattcgccggccggaaggcggtgatcgtgcgcgtgttcgaggagggcacccgcgaccgtccctatgggcactgcctcgtcgccggcctggccaagtaccccaagaaggtgatccgcaaggactccgccaagaagacggccaagaagtcccgcgtcaagtgcttcatcaagctcgtcaatttcactcacctcatgcccacccgctacaccctcgacgtcgacttcaaggacgtcgcctcgggcgggcccgacgcgctctccacccgggacaagaaggtcgaggcctgcaaggccgccaaggcgcgcctcgaggagaggttcaagaccggcaagaacaggtgg

SEQ ID NO: 87 - protein, 158 aa, Zea mays
  misc_feature: Ceres CLONE ID no.376108
  misc_feature: Bit score of 302.8 for HMM based on sequences of FIGURE 4.
  misc_feature (52)..(137): Pfam Name: Ribosomal_L27e Pfam Description: Ribosomal L27e protein family
  misc_feature (7)..(40): Pfam Name: KOW Pfam Description: KOW motif
  misc_feature: Functional Homolog Of Ceres CLONE ID no. 547495 at SEQ ID NO. 32
  misc_feature (90)..(90): Xaa is any aa, unknown, or other
  misc_feature (97)..(97): Xaa is any aa, unknown, or other
  misc_feature (125)..(125): Xaa is any aa, unknown, or other
  misc_feature (130)..(130): Xaa is any aa, unknown, or other
MVKFLKPGKAVILLQGRFAGRKAVIVRVFEEGTRDRPYGHCLVAGLAKYPKKVIRKDSAKKTAKKSRVKCFIKLVNFTHLMPTRYTLDVXFKDVASXGPDALSTRDKKVEACKAAKARLEERFKXGKNRXFFPKFRFWGPGPPQRDCFSCQFVVWETI

SEQ ID NO: 88 - DNA, 591 bp, Musa acuminata
  misc_feature: Ceres CLONE ID no.1731902
  misc_feature: Encodes the peptide sequence at SEQ ID NO. 89
aaaagaggagaagatggtgaagtttctgaagccgaacaaggcggtgatcatccttcaagggcgattcgctgggaggaaggcagtgatcgtgcgggccttcgacgacggcactcgggagcggccttacgggcactgcctggtggccggcgtcgccaagtacccgaagaaggtcatccgcaaggactcggcgaagaagacggccaagaagtcgcgggtgaaggcgttcctgaagctggtcaattatagccatatcatgcccacccgctacaccctcgacgtcgatctcaaggacgtcgtcaccgccgattcccttcagtcccgcgacaagaaggtcaccgcctgcaaggataccaaggcccgcctcgaggaacgcttcaagactggtaagaaccggtggttcttcaccaagctaaggttctaatctcttctagcccacttttcttagatctatctaccagtaatatttctactgcttccatcatcgtctgtcgagatctatagcgttctatggggtttttagtctcattttggttcatcggaggacgaaactgattttatcatggatcgaatgacattttacaactgttgctt

SEQ ID NO: 89 - protein, 135 aa, Musa acuminata
  misc_feature: Ceres CLONE ID no.1731902
  misc_feature: Bit score of 335.5 for HMM based on sequences of FIGURE 4.
  misc_feature (52)..(135): Pfam Name: Ribosomal_L27e Pfam Description: Ribosomal L27e protein family
  misc_feature (7)..(40): Pfam Name: KOW Pfam Description: KOW motif
  misc_feature: Functional Homolog Of Ceres CLONE ID no. 547495 at SEQ ID NO. 32
MVKFLKPNKAVIILQGRFAGRKAVIVRAFDDGTRERPYGHCLVAGVAKYPKKVIRKDSAKKTAKKSRVKAFLKLVNYSHIMPTRYTLDVDLKDVVTADSLQSRDKKVTACKDTKARLEERFKTGKNRWFFTKLRF

SEQ ID NO: 90 - DNA, 688 bp, Panicum virgatum
  misc_feature: Ceres CLONE ID no.1760193
  misc_feature: Encodes the peptide sequence at SEQ ID NO. 91
gtccctccctcgcccaccatttttgtccacctcctgagccctccccaccctccaaccccggcggcggcagcggcggcggcgcagcagcagcagcagcagtagctgaagatggtgaagttcctgaagcccggcaaggccgtgatcctccttcagggccggttcgccggccggaaggcggtgatcgtgcgcgtgttcgaggagggcacacgcgaccgcccctacgggcactgcctcgtcgccggcctcgccaagtatcccaagaaggtgatccgcaaggactccgccaagaagacggccaagaagtcccgtgtcaagtgcttcatcaagctcgttaacttcacccacctcatgcccacccgctacacccttgacgtcgacttcaaggacgtcgcctcgggcgggcccgacgcgctctccacccgggacaagaaggtcgccgcctgcaaggccgcgaaggcccgcctcgaggagaggttcaagacaggcaagaacaggtggttctttaccaagctccgcttctagatgccaggcgtccagcatagtacctgctttagttgtcaatttcatgtatcggacacccttatctctgttttggtattgccgtgaagacttcgtgcttactgttatggatcttggagacgatgtcatgtggatgatgtgtcgaatgatgccaatcatagatcctgtc

SEQ ID NO: 91 - protein, 137 aa, Panicum virgatum
  misc_feature: Ceres CLONE ID no.1760193
  misc_feature: Bit score of 325.1 for HMM based on sequences of FIGURE 4.
  misc_feature (52)..(137): Pfam Name: Ribosomal_L27e Pfam Description: Ribosomal L27e protein family
  misc_feature (7)..(40): Pfam Name: KOW Pfam Description: KOW motif
  misc_feature: Functional Homolog Of Ceres CLONE ID no. 547495 at SEQ ID NO. 32
MVKFLKPGKAVILLQGRFAGRKAVIVRVFEEGTRDRPYGHCLVAGLAKYPKKVIRKDSAKKTAKKSRVKCFIKLVNFTHLMPTRYTLDVDFKDVASGGPDALSTRDKKVAACKAAKARLEERFKTGKNRWFFTKLRF

SEQ ID NO: 92 - DNA, 656 bp, Panicum virgatum
  misc_feature: Ceres CLONE ID no.1762010
  misc_feature: Encodes the peptide sequence at SEQ ID NO. 93
atttttttctccacctcccgtgccctccccccaccttcccacctctgcggcgcagcagcagcagctgaagatggtgaagttcctgaagcccggcaaggccgtgatcgtccttcagggtcggttcgccggccggaaggcggtgatcgtgcgcgtgttcgaggagggcacccgcgaccgcccctacgggcactgcctcgtcgccggcctcgccaagtaccccaagaaggtgatccgcaaggactctgccaagaagacggccaagaagtcccgggtcaagtgcttcatcaagctcgtaaacttcacccacatcatgcccacccgctacacccttgacgtcgactttaaggacgtcgcctcgggcgggcccgacgcgctctccacccgggacaagaaggtcgccgcctgcaaggccgcgaagtaccgcctcgaggagaggttcaagacaggcaagaacaggtggttctttaccaagctccgcttctagatgccgggcgtccagcatagtacctgctttagttgtcaatttcatgtgtcagacacccttatctctgttttggtattgccattaagacttcgtgcttatggatcttggagagtatgacatgtcgatgatgtgttaaatgatgtcaatcatagatcttgtccaaattttgttc

SEQ ID NO: 93 - protein, 137 aa, Panicum virgatum
  misc_feature: Ceres CLONE ID no.1762010
  misc_feature: Bit score of 322.6 for HMM based on sequences of FIGURE 4.
  misc_feature (52)..(137): Pfam Name: Ribosomal_L27e Pfam Description: Ribosomal L27e protein family
  misc_feature (7)..(40): Pfam Name: KOW Pfam Description: KOW motif
  misc_feature: Functional Homolog Of Ceres CLONE ID no. 547495 at SEQ ID NO. 32
MVKFLKPGKAVIVLQGRFAGRKAVIVRVFEEGTRDRPYGHCLVAGLAKYPKKVIRKDSAKKTAKKSRVKCFIKLVNFTHIMPTRYTLDVDFKDVASGGPDALSTRDKKVAACKAAKYRLEERFKTGKNRWFFTKLRF

SEQ ID NO: 94 - DNA, 686 bp, Panicum virgatum
  misc_feature: Ceres CLONE ID no.1759699
  misc_feature: Encodes the peptide sequence at SEQ ID NO. 95
gccatttcctcaaccgaagccctacccacccatccaccccggcagcggcggcggcgtagcagcagcagaagcacccgaagatggtgaagttcctgaagcccggcaaggccgtgatcctcctccagggccggttcgccggccgcaaggcggtgatcgtgcgcgtgttcgaagagggtacccgcgaccgcccctacggccactgcctcgtcgccggcctggccaagtaccccaagaaggtgatccgcaaggactccaccaagaagaccgccaagaagtcccgcgtcaagtgcttcatcaagctcgtcaacttcacccacatcatgcccacccgctacacgctggacgtcgacttcaaggacgtcgcctcgggcgggcccgacgcgctctctacccgggacaataaggtcgccgcttgcaaggccgccaaggcgcgcctcgaggagaggttcaagaccggcaagaacaggtggttctttaccaagctccgcttctagatgcttggcgtcccgcatagtgcctgctttaggtgtcagtttcttgtatcggacactctttaagctatctctgctttggtattgccatgaagacttcgtgcttagtattacggatctaggagataattttattaagacatgttgttgatgtgctaaatgttgtcaatcatagatctggctgaaattttgttc

SEQ ID NO: 95 - protein, 137 aa, Panicum virgatum
  misc_feature: Ceres CLONE ID no.1759699
  misc_feature: Bit score of 321.5 for HMM based on sequences of FIGURE 4.
  misc_feature (52)..(137): Pfam Name: Ribosomal_L27e Pfam Description: Ribosomal L27e protein family
  misc_feature (7)..(40): Pfam Name: KOW Pfam Description: KOW motif
  misc_feature: Functional Homolog Of Ceres CLONE ID no. 547495 at SEQ ID NO. 32
MVKFLKPGKAVILLQGRFAGRKAVIVRVFEEGTRDRPYGHCLVAGLAKYPKKVIRKDSTKKTAKKSRVKCFIKLVNFTHIMPTRYTLDVDFKDVASGGPDALSTRDNKVAACKAAKARLEERFKTGKNRWFFTKLRF

SEQ ID NO: 96 - DNA, 614 bp, Panicum virgatum
  misc_feature: Ceres CLONE ID no.2028803
  misc_feature: Encodes the peptide sequence at SEQ ID NO. 97
ctcttttcgtctcggtagcaggacgaggacctatcatcatggtgaagttcctcaagcccgggaaagtggtcgtggtcttgtctggtcggttcgccggcaagaaggctgtcatcgtgaggaaccacgatgatgggacaaccggccgcccatatgggtgcgctctgcttgtcggcctgcgcaaggagccccgcaaggtgaccaagaggcagacagccaagaggcaggcgaagaagtctaccctcaagacattcatcaagactgtgaactacaaccacttgatgccaactcgctataccctggacgtggatttcagcaagtccatcacagccgaggttgtggagaacagcacaaagaaggtcgaggccagcaaggaggccaagaagctgctggaggagaagttcaagactggcaagaacaggtggttcttcaccaagttgcgcttctaagctgttctctttgcgtcaacatctcagtacaacatccaccccttctttcaccattatctggggcaccatcacaggtcacctcaagctgggcataatgccttgttcaagggcacgcactgggatcccatgatgttgtagtgtcctgcttatggtgtaaagattcttacc

SEQ ID NO: 97 - protein, 135 aa, Panicum virgatum
  misc_feature: Ceres CLONE ID no.2028803
  misc_feature: Bit score of 273.7 for HMM based on sequences of FIGURE 4.
  misc_feature (52)..(135): Pfam Name: Ribosomal_L27e Pfam Description: Ribosomal L27e protein family
  misc_feature (7)..(32): Pfam Name: KOW Pfam Description: KOW motif
  misc_feature: Functional Homolog Of Ceres CLONE ID no. 547495 at SEQ ID NO. 32
MVKFLKPGKVVVVLSGRFAGKKAVIVRNHDDGTTGRPYGCALLVGLRKEPRKVTKRQTAKRQAKKSTLKTFIKTVNYNHLMPTRYTLDVDFSKSITAEVVENSTKKVEASKEAKKLLEEKFKTGKNRWFFTKLRF

SEQ ID NO: 98 - protein, 137 aa, Oryza sativa subsp. japonica
  misc_feature: Public GI ID no.115445581
  misc_feature: Bit score of 324.4 for HMM based on sequences of FIGURE 4.
  misc_feature (52)..(137): Pfam Name: Ribosomal_L27e Pfam Description: Ribosomal L27e protein family
  misc_feature (7)..(40): Pfam Name: KOW Pfam Description: KOW motif
  misc_feature: Functional Homolog Of Ceres CLONE ID no. 547495 at SEQ ID NO. 32
MVKFLKPGKAVILLQGRYAGRKAVIVRVFEEGTRDRPYGHCLVAGLAKYPKKVIRKDSAKKTAKKSRVKCFLKLVNFTHIMPTRYTLDVDFKDVASGGPDALATRDKKVAACKAAKARLEERFKTGKNRWFFTKLRF

SEQ ID NO: 99 - protein, 136 aa, Oryza sativa subsp. japonica
  misc_feature: Public GI ID no.115483480
  misc_feature: Bit score of 320.1 for HMM based on sequences of FIGURE 4.
  misc_feature (52)..(136): Pfam Name: Ribosomal_L27e Pfam Description: Ribosomal L27e protein family
  misc_feature (7)..(40): Pfam Name: KOW Pfam Description: KOW motif
  misc_feature: Functional Homolog Of Ceres CLONE ID no. 547495 at SEQ ID NO. 32
MVKFLKPGKAVILLQGRFAGRKAVIVRVFEEGTRDRPYGHCLVAGLAKYPKKVIRKDSAKKTAKKSRVKCFLKLVNFTHLMPTRYTLDVDLKEVAAGPDALATRDKKVAACKSAKARLEDRFKTGKNRWFFTKLRF

SEQ ID NO: 100 - protein, 135 aa, Chara globularis
  misc_feature: Public GI ID no.50843988
  misc_feature: Bit score of 301.3 for HMM based on sequences of FIGURE 4.
  misc_feature (52)..(135): Pfam Name: Ribosomal_L27e Pfam Description: Ribosomal L27e protein family
  misc_feature (7)..(40): Pfam Name: KOW Pfam Description: KOW motif
  misc_feature: Functional Homolog Of Ceres CLONE ID no. 547495 at SEQ ID NO. 32
MVKFLKQNKVVVLLNGRYAGHKAVIVKNFDGGTGGRPYGHALVAGIAKYPRKVTKRLSEKKLAKRARLKPFIKVINYNHIMPTRYALDVDLKTTVIPEKLETQAKKVETRKEVKKILEERFKTGKNRWFFSKLRF

SEQ ID NO: 101 - DNA, 469 bp, Glycine max
  misc_feature: Ceres CLONE ID no.560692
  misc_feature: Inplanta Sequence
  misc_feature: Encodes the peptide sequence at SEQ ID NO. 102
gaggaggaaaaaagaccagcggttgacgatgaaacagaagtgtcttgttgttctggtctttgttgttctcttggcttgtgcgtttggttgggatgagggtatacccggcggatggaaccccatcaagaacattaacgatcctcacgtgacggagatcgcgaatttcgccgtgacggaatacgataagcaatccggtgagaagctaaagttggtgaaggttatcaaaggcgaccttcaggtagtagcaggcctcaactaccgcctcagcctcaccgccagcgactccaacaattaccaagcaattgtctatgagaaggcgtgggcccgggagcattacagaaaccttacctcctttacccctcttcatgcttaacctcttttgtcttatcttctctactgtattattttaaccaataaaaaggttaagtgaatgagaatggcctctttatctcaaaaaaaaaaaaaaaaa

SEQ ID NO: 102 - protein, 114 aa, Glycine max
  misc_feature: Ceres CLONE ID no.560692
  misc_feature: Bit score of 259.8 for HMM based on sequences of FIGURE 3.
  misc_feature (27)..(87): Pfam Name: Cystatin Pfam Description: Cystatin domain
MKQKCLVVLVFVVLLACAFGWDEGIPGGWNPIKNINDPHVTEIANFAVTEYDKQSGEKLKLVKVIKGDLQVVAGLNYRLSLTASDSNNYQAIVYEKAWAREHYRNLTSFTPLHA

SEQ ID NO: 103 - protein, 116 aa, Actinidia deliciosa
  misc_feature: Public GI ID no.40807635
  misc_feature: Bit score of 251.6 for HMM based on sequences of FIGURE 3.
  misc_feature (30)..(89): Pfam Name: Cystatin Pfam Description: Cystatin domain
  misc_feature: Functional Homolog Of Ceres CLONE ID no. 560692 at SEQ ID NO. 102
MVPKPLSLLLFLLLALSAAVVGGRKLVAAGGWRPIESLNSAEVQDVAQFAVSEHNKQANDELQYQSVVRGYTQVVAGTNYRLVIAAKDGAVVGNYEAVVWDKPWMHFRNLTSFRKV

SEQ ID NO: 104 - protein, 115 aa, Actinidia deliciosa
  misc_feature: Public GI ID no.40807637
  misc_feature: Bit score of 233.7 for HMM based on sequences of FIGURE 3.
  misc_feature (29)..(88): Pfam Name: Cystatin Pfam Description: Cystatin domain
  misc_feature: Functional Homolog Of Ceres CLONE ID no. 560692 at SEQ ID NO. 102
MVPKTFSMLLLLIALSAAVVGGRKQVVLGGWRPIKDLNSAEVQDVAQFAVSEHNKQANDKLQYQRVVRGYSQVVAGTNYRLVIAAKDGAVLGKYEAFVWDKPWMQFRNLTSFRKV

SEQ ID NO: 105 - DNA, 534 bp, Gossypium hirsutum
  misc_feature: Ceres CLONE ID no.1798511
  misc_feature: Encodes the peptide sequence at SEQ ID NO. 106
agaggctacagctctacagcacaacaaaaaaggcaactagacttgagaaagaaaaacagtctcaaaatgcagcagaagtcaggcttcctgatcctcttgctctccctcattttccttcctctcatcttctccgacgccagaaaggaggctcccctcggaggatggagtccgatcaaagacaccaaggacccacacgtgataaagatcgcggaattcgccgtcgaggagtataacaagcagtcaaatgggagtttaaagttggttaaggtggtgaaaggcgagacccaggtggtggccgggacaaactaccggttgattttgcaggcgaaggaagggaccttcgataacacgtataaggctgtggtgtgggagaagttgtggctgaatttcaggaatctcacctcctttaacctcgtcaagggttagatttgattataatgtaatttatgttcatatatgttatccttgtccttttctattacttaacagagtggagaataaaatcttaataatacataattatgtgagtttgag

SEQ ID NO: 106 - protein, 119 aa, Gossypium hirsutum
  misc_feature: Ceres CLONE ID no.1798511
  misc_feature: Bit score of 275.6 for HMM based on sequences of FIGURE 3.
  misc_feature (31)..(118): Pfam Name: Cystatin Pfam Description: Cystatin domain
  misc_feature: Functional Homolog Of Ceres CLONE ID no. 560692 at SEQ ID NO. 102
MQQKSGFLILLLSLIFLPLIFSDARKEAPLGGWSPIKDTKDPHVIKIAEFAVEEYNKQSNGSLKLVKVVKGETQVVAGTNYRLILQAKEGTFDNTYKAVVWEKLWLNFRNLTSFNLVKG

SEQ ID NO: 107 - DNA, 1047 bp, Gossypium hirsutum
  misc_feature: Ceres CLONE ID no.1793376
  misc_feature: Encodes the peptide sequence at SEQ ID NO. 108
agaggctaccgctctaccgcacaacaaaaaaggcaactagacttgagaaagaaaaaccgtctccaaatgcagcagaagtccggcttcctgatcctcttgctctccctccttttccttcctctcctcttctccgacgccagaaaggaggctcccctcggaggatggagtcccatcaaagacaccaaggacccccacgtgataaagatcgcggaattcgccgtcgaggagtataacaagcagtcaaatgggagtttaaagttggttaaggtggtgaaaggcgagacccaggtggtggccgggacaaactaccggttgattttgcaggcgaaggaagggaccttcgataacacgtataaggctgtggtgtgggagaagttgtggctgaatttcaggaatctcacctcctttaacctcgtcaagggttagatttgattataatgtaatttatgttcatatatgttatccttgtccttttctattacttaacagagtggagaaactgcaccaactcttcgcccttctgtaaaattccctcaaaagagaagaagaagaaaataccaataactatcagctaacgatgagttattacaatcagcaacagcctcccgttggcgttcctcctcctcaaggttatccaccggaaggttatcctccaaaggatgcttatccaccaccagggtatcccccacaaggatatcctcaaggttatcctcaacagggataccctccgcagggatatcctcctcaatatgctcagcctcctcctcctcagcaaaagcagagttcgggtttcgtagaaggctgtttggctgctctttgctgttgctgtcttctggatgcttgtttttgactaccttttctccaatggcagcttagaaaaatattgaattgataggagagttgaattcaattaccattttcaaacttcaatttcaaatgttcttctttcccttcatcgctttttttctgcttaataattgaacccttcattggatttgaactcttgtttacatacactgtaatattaggatctttttcctttgttct

SEQ ID NO: 108 - protein, 119 aa, Gossypium hirsutum
  misc_feature: Ceres CLONE ID no.1793376
  misc_feature: Bit score of 275.7 for HMM based on sequences of FIGURE 3.
  misc_feature (31)..(118): Pfam Name: Cystatin Pfam Description: Cystatin domain
  misc_feature: Functional Homolog Of Ceres CLONE ID no. 560692 at SEQ ID NO. 102
MQQKSGFLILLLSLLFLPLLFSDARKEAPLGGWSPIKDTKDPHVIKIAEFAVEEYNKQSNGSLKLVKVVKGETQVVAGTNYRLILQAKEGTFDNTYKAVVWEKLWLNFRNLTSFNLVKG

SEQ ID NO: 109 - DNA, 342 bp, Populus balsamifera subsp. trichocarpa
  misc_feature: Ceres ANNOT ID no.1453285
  misc_feature: Encodes the peptide sequence at SEQ ID NO. 110
atgaaacgacaaatactaaccctctccctcctcttcatcgctgtaaccgtcgtggtggttgacgcggcgctcctcggcggatggagtccgataaaggacttgaaagacaagcacgtggtagagatcgcggagttcgccgttgcagagcataacaaggaagccaaatcaaatttgatgcttgagagtatcgttaaaggcgaatcgcaggtggtatcgggtacgaattatcggctcgttttggcagtgaaaggaagggctaatgccacgtaccaggctgttgtgtatgagaaaccttgggagaatttgaagagtctgacgtcgtttcaaccttttaaaggttga

SEQ ID NO: 110 - protein, 113 aa, Populus balsamifera subsp. trichocarpa
  misc_feature: Ceres ANNOT ID no.1453285
  misc_feature: Bit score of 245.7 for HMM based on sequences of FIGURE 3.
  misc_feature (26)..(112): Pfam Name: Cystatin Pfam Description: Cystatin domain
  misc_feature: Functional Homolog Of Ceres CLONE ID no. 560692 at SEQ ID NO. 102
MKRQILTLSLLFIAVTVVVVDAALLGGWSPIKDLKDKHVVEIAEFAVAEHNKEAKSNLMLESIVKGESQVVSGTNYRLVLAVKGRANATYQAVVYEKPWENLKSLTSFQPFKG

SEQ ID NO: 111 - DNA, 548 bp, Arabidopsis thaliana
  misc_feature: Ceres CLONE ID no.31680
  misc_feature: Encodes the peptide sequence at SEQ ID NO. 112
aattttgaggaaacaacagttacaaagcaaaatgactagtaaggtcgtcttccttcttctcctctctctcgtcgtcctcctcctccctctctacgcctctgcggctgcccgtgtcggtggctggagtcccatcagcaacgttacggaccctcaagtcgtagagatcggtgaattcgcggtctccgagtacaacaaacggagcgaatcgggactcaagttcgagacggttgttagcggcgagactcaggtcgtatctggtacaaattaccgtcttaaggtggcggctaatgacggcgacggagtgagcaagaactacttggcaatcgtatgggacaagccgtggatgaaattcagaaatctcacttccttcgagcctgccaataatggtcgcttcctttaagcttttaacatgtaacccgctctttattaatattgcagaaacattaaaaacaaaggagttaaaataaacataagacaattattgtgtctattttatgtatttctatagttttcaaaatatgcaaatctgaagaaatgatgattgaacc

SEQ ID NO: 112 - protein, 122 aa, Arabidopsis thaliana
  misc_feature: Ceres CLONE ID no.31680
  misc_feature: Bit score of 267.1 for HMM based on sequences of FIGURE 3.
  misc_feature (29)..(117): Pfam Name: Cystatin Pfam Description: Cystatin domain
  misc_feature: Functional Homolog Of Ceres CLONE ID no. 560692 at SEQ ID NO. 102
MTSKVVFLLLLSLVVLLLPLYASAAARVGGWSPISNVTDPQVVEIGEFAVSEYNKRSESGLKFETVVSGETQVVSGTNYRLKVAANDGDGVSKNYLAIVWDKPWMKFRNLTSFEPANNGRFL

SEQ ID NO: 113 - DNA, 444 bp, Brassica napus
  misc_feature: Ceres CLONE ID no.1117567
  misc_feature: Encodes the peptide sequence at SEQ ID NO. 114
ataactgaggaggaaaaaagaccagcggttgacgatgaaacagaagtgtcttgttgttctggtctttgttgttctcttggcttgtgcggttggttgggatgagggtatacccggcggatggaaccccatcaagaacattaacgatcctcacgtgacggagatcgcgaatttcgccgtgacggaatacgataagcaatccggtgagaagctaaagttggtgaaggttatcaaaggcgaccttcaggtagtagcaggcctcaactaccgcctcagcctcaccgccagcgactccaacaattaccaagcaattgtctatgagaaggcgtgggcccgggagcattacagaaaccttacctcctttacccctcttcatgcttaacctcttttgtcttatcttctctactgtattattttaaccaataaaaaggtaagtgaatgagaatg

SEQ ID NO: 114 - protein, 114 aa, Brassica napus
  misc_feature: Ceres CLONE ID no.1117567
  misc_feature: Bit score of 260.5 for HMM based on sequences of FIGURE 3.
  misc_feature (27)..(87): Pfam Name: Cystatin Pfam Description: Cystatin domain
  misc_feature: Functional Homolog Of Ceres CLONE ID no. 560692 at SEQ ID NO. 102
MKQKCLVVLVFVVLLACAVGWDEGIPGGWNPIKNINDPHVTEIANFAVTEYDKQSGEKLKLVKVIKGDLQVVAGLNYRLSLTASDSNNYQAIVYEKAWAREHYRNLTSFTPLHA

SEQ ID NO: 115 - protein, 115 aa, Brassica oleracea
  misc_feature: Public GI ID no.89257437
  misc_feature: Bit score of 240.9 for HMM based on sequences of FIGURE 3.
  misc_feature (24)..(115): Pfam Name: Cystatin Pfam Description: Cystatin domain
  misc_feature: Functional Homolog Of Ceres CLONE ID no. 560692 at SEQ ID NO. 102
MNSRAIFLLLLLLSFHASAMLPAGRWSPISNVKDPHVVEVGKFAVSEYDMESKSELKFVVVVSGESKVVAGTNYRLIVAVNDGVAGPGASKNYEAIVWEKQWLKSMNLTSFKPVV

SEQ ID NO: 116 - protein, 114 aa, Medicago truncatula
  misc_feature: Public GI ID no.92874200
  misc_feature: Bit score of 243.0 for HMM based on sequences of FIGURE 3.
  misc_feature (26)..(101): Pfam Name: Cystatin Pfam Description: Cystatin domain
  misc_feature: Functional Homolog Of Ceres CLONE ID no. 560692 at SEQ ID NO. 102
MRLQSVVFLLLGFLATMSVRNQAIAGGWEPIKNINDPHVIDIANYAVTEHDKQAGLNLKLEKVISGETKVVDGIIYCLNITASDGSASNKYNLAVLEKLEQHFRNLTSFVPLQN

SEQ ID NO: 117 - protein, 113 aa, Medicago truncatula
  misc_feature: Public GI ID no.92895016
  misc_feature: Bit score of 134.9 for HMM based on sequences of FIGURE 3.
  misc_feature (25)..(78): Pfam Name: Cystatin Pfam Description: Cystatin domain
  misc_feature: Functional Homolog Of Ceres CLONE ID no. 560692 at SEQ ID NO. 102
MRFQYLVIFLLVLLASAARNQAIPGGYSPIKNLNDHHLIEIANFAVTEYGKQQGIKQIKLEKITKGETQVVDGTNYRLLLSAIIESMSYPYQAIVYENRLKNFKKLISFVPIN

SEQ ID NO: 118 - protein, 118 aa, Medicago truncatula
  misc_feature: Public GI ID no.92887012
  misc_feature: Bit score of 120.5 for HMM based on sequences of FIGURE 3.
  misc_feature (26)..(88): Pfam Name: Cystatin Pfam Description: Cystatin domain
  misc_feature: Functional Homolog Of Ceres CLONE ID no. 560692 at SEQ ID NO. 102
MRLESMVLVLVVLLAFTATKQAIPIGNLSPINNINDPKVIDVANFAVKEYNNRRRKPEEKLRLWKVIKGESQIVADGVNYRLTLSATKVYTSNTYEAIVLEWSLQHLRNLTSFKLIQA

SEQ ID NO: 119 - protein, 111 aa, Medicago truncatula
  misc_feature: Public GI ID no.87241056
  misc_feature: Bit score of 68.8 for HMM based on sequences of FIGURE 3.
  misc_feature (22)..(109): Pfam Name: Cystatin Pfam Description: Cystatin domain
  misc_feature: Functional Homolog Of Ceres CLONE ID no. 560692 at SEQ ID NO. 102
MRFQSLILILIVLFALATTNQATFVDINDSEVIKVATFAVTEYNKQHTKAKLKFEKVINGISNLGNNVTIINYRLTLSANNGSASNNYPAIVLDKSSEIFSLIAFALISHA

SEQ ID NO: 120 - protein, 117 aa, Oryza sativa subsp. japonica
  misc_feature: Public GI ID no.122230834
  misc_feature: Bit score of 233.7 for HMM based on sequences of FIGURE 3.
  misc_feature (28)..(84): Pfam Name: Cystatin Pfam Description: Cystatin domain
  misc_feature: Functional Homolog Of Ceres CLONE ID no. 560692 at SEQ ID NO. 102
MTMRTSSLLLAAVAVVAIVAGATAATVGSWEPVDINDPHVQELGRWAVAEEDRGVAAGGLTFERVTDGEKQVVAGVNYRLTLEASSSGAKDGRYEAVVYEQDPRSNARKLVSFEPIH

SEQ ID NO: 121 - DNA, 494 bp, Triticum aestivum
  misc_feature: Ceres CLONE ID no.888852
  misc_feature: Encodes the peptide sequence at SEQ ID NO. 122
tagaacatcctaatcgaaaaataactgaggaggaaaaaagaccagcggttgacgatgaaacagaagtgtcttgttgttctggtctttgttgttctcttggcttgtgcggttggttgggatgagggtatacccggcggatggaaccccatcaagaacattaacgatcctcacgtgacggagatcgcgaatttcgccgtgacggaatacgataagcaatccggtgagaagctaaagttggtgaaggttatcaaaggcgaccttcaggtagtagcaggcctcaactaccgcctcagcctcaccgccagcgactccaacaattaccaagcaattgtctatgagaaggcgtgggcccgggagcattacagaaaccttacctcctttacccctcttcatgcttaacctcttttgtcttatcttctctactgtattattttaaccaataaaaaggttaagtgaatgagaatggcctctttatcttaatttatttttattac

SEQ ID NO: 122 - protein, 114 aa, Triticum aestivum; identical to SEQ ID NO: 114
  misc_feature: Ceres CLONE ID no.888852
  misc_feature: Bit score of 260.5 for HMM based on sequences of FIGURE 3.
  misc_feature (27)..(87): Pfam Name: Cystatin Pfam Description: Cystatin domain
  misc_feature: Functional Homolog Of Ceres CLONE ID no. 560692 at SEQ ID NO. 102

SEQ ID NO: 123 - DNA, 636 bp, Zea mays
  misc_feature: Ceres CLONE ID no.1389074
  misc_feature: Encodes the peptide sequence at SEQ ID NO. 124
atccagcatttgtttgacaatgagacatcagtgcctccttctggtctccctggtgttggtctcctacgctgcccggtcggaatcagcgctgggcggctggagccccatcaaggacgtaaacgacagccacgtggcggagatcgccaactacgcgctgagcgagtacgacaagcgttctggggccaagctcacccttgtcaaggtcgtcaagggcgagactcaggtcgtttccggcaccaactaccgtctcgtcctcaaagccaaggatggatccgccacggccagttacgaagccatcgtctgggagaagccttggctccatttcatgaatctcacttccttcaaaccccttcattaatcttagacccatacttttcttcactttctctcttatcatatttcatgtgttagctattctgtttttctcaataaggttcctgtcatgtgctaatgaatctcaaattgtatgttggattatggattcctctattctctcgctctcgggtttttctggaaattttgtttgtggtttctgcttttcaggttttcatatttatttctgtgggcgattcgactttgtaatttcaatgtctaagtgtgtatttagttacccatatcaatttgaaatagtaattt

SEQ ID NO: 124 - protein, 112 aa, Zea mays
  misc_feature: Ceres CLONE ID no.1389074
  misc_feature: Bit score of 262.6 for HMM based on sequences of FIGURE 3.
  misc_feature (25)..(112): Pfam Name: Cystatin Pfam Description: Cystatin domain
  misc_feature: Functional Homolog Of Ceres CLONE ID no. 560692 at SEQ ID NO. 102
MRHQCLLLVSLVLVSYAARSESALGGWSPIKDVNDSHVAEIANYALSEYDKRSGAKLTLVKVVKGETQVVSGTNYRLVLKAKDGSATASYEAIVWEKPWLHFMNLTSFKPLH

SEQ ID NO: 125 - protein, 118 aa, Citrus x paradisi
  misc_feature: Public GI ID no.11596186
  misc_feature: Bit score of 271.5 for HMM based on sequences of FIGURE 3.
  misc_feature (30)..(117): Pfam Name: Cystatin Pfam Description: Cystatin domain
  misc_feature: Functional Homolog Of Ceres CLONE ID no. 560692 at SEQ ID NO. 102
MNQRFCCLIVLFLSVVPLLAAGDRKGALVGGWKPIEDPKEKHVMEIGQFAVTEYNKQSKSALKFESVEKGETQVVSGTNYRLILVVKDGPSTKKFEAVVWEKPWEHFKSLTSFKPMVK

SEQ ID NO: 126 - DNA, 771 bp, Panicum virgatum
  misc_feature: Ceres CLONE ID no.1771297
  misc_feature: Encodes the peptide sequence at SEQ ID NO. 127
agatctccacaccacccgtcgcaagacaatcccccctctaccttctcgacccaatcccaagctcccacccatccggccatgtcgagacccctcctcctctttgccgccctcgccgtcgccgtcgccgcccccgccgtcgccgcccccgcccgcgtggggatgccgggcgggtggagcgcgatcccggacgtgagcgacccgcacatccaggagctgggcgggtgggcactggggcaggcgaagcggacgcggctggccggcgaggggctgcagttccgccgcgtggtgcgcggggagcagcaggtggtgtccgggatgaactaccgcctctacgtcgacgccgcggacgccgcggggcggagcgcgccctacgtcgccgtcgtgtacgagcaggtctggaccagcacccgcgagctcacctccttcagcaaggcgccccgcgccaactgaatcgtccgtccatgccatgatccaccccggtgaccccggatcggcggccgacgacgccggcgtcagcgccctctctttctctcctccatgttaattagtaattacatctagcgaacattactgctgctagtatatgctgccagtgaatgagtactgcgttttactactagttgctgttgtggggttaatctgtgacccagctatgtggatgaacatgcgcgtaatcgatcgaggctgtgtgctagaagtagaactatactgctggacttgtactataatgatgtaatcaagagtttgtgtgcctgtgttggctcttgtgtc

SEQ ID NO: 127 - protein, 123 aa, Panicum virgatum
  misc_feature: Ceres CLONE ID no.1771297
  misc_feature: Bit score of 249.9 for HMM based on sequences of FIGURE 3.
  misc_feature (30)..(91): Pfam Name: Cystatin Pfam Description: Cystatin domain
  misc_feature: Functional Homolog Of Ceres CLONE ID no. 560692 at SEQ ID NO. 102
MSRPLLLFAALAVAVAAPAVAAPARVGMPGGWSAIPDVSDPHIQELGGWALGQAKRTRLAGEGLQFRRVVRGEQQVVSGMNYRLYVDAADAAGRSAPYVAVVYEQVWTSTRELTSFSKAPRAN

SEQ ID NO: 128 - protein, 118 aa, Oryza sativa subsp. indica
  misc_feature: Public GI ID no.125542858
  misc_feature: Bit score of 169.5 for HMM based on sequences of FIGURE 3.
  misc_feature (27)..(84): Pfam Name: Cystatin Pfam Description: Cystatin domain
  misc_feature: Functional Homolog Of Ceres CLONE ID no. 560692 at SEQ ID NO. 102
MAMTTRTLLLAAVCDAAVCAAAALPRGWSPIKNIDDPHIQELGRWAITENNRVSPSDELTFHRVTGGEQQVVSGMNYRLEIEAASGGGDVTGSYGAVVFEQEWSNTRKLISFDKNHNF

SEQ ID NO: 129 - protein, 128 aa, Hordeum vulgare subsp. vulgare
  misc_feature: Public GI ID no.109238661
  misc_feature: Bit score of 271.3 for HMM based on sequences of FIGURE 3.
  misc_feature (41)..(98): Pfam Name: Cystatin Pfam Description: Cystatin domain
  misc_feature: Functional Homolog Of Ceres CLONE ID no. 560692 at SEQ ID NO. 102
MRTSSFLVIIVGVFLYAISSPATGCGERIGNQLWSTTIDNGWEPIRNINDKHIQELGSWAVLEFIKHVNCVLKFNKVVSGRQQLVSGMNYELIINASDFGGKDGKYKAEVYEQKWTSKRELLSFTKVN

SEQ ID NO: 130 - protein, 115 aa, Actinidia eriantha
  misc_feature: Public GI ID no.40807639
  misc_feature: Bit score of 249.1 for HMM based on sequences of FIGURE 3.
  misc_feature (29)..(88): Pfam Name: Cystatin Pfam Description: Cystatin domain
  misc_feature: Functional Homolog Of Ceres CLONE ID no. 560692 at SEQ ID NO. 102
MVPKPLSLLFLLLALSAAVVGGRKLVAPGGWRPIENLNSAEVQDVAQFAVSEHNKQANDELQYQSVVRGYTQVVSGTNYRLVIAAKDGAVVGNYEAVVWDKPWMHFRNLTSFRKV

SEQ ID NO: 131 - DNA, 381 bp, Sorghum bicolor
  misc_feature: Ceres ANNOT ID no.6067852
  misc_feature: Encodes the peptide sequence at SEQ ID NO. 132
atgaggaccctcatttccatgctcgtcgtcgccgccgccgcggtggtcggcctgtgctctgtggctcccgctgcatcagcgcgcggggagccgccggtgccgcaggccgtcggcgggtggaagccgattaatgtgaacgacccccacatccaagagctcggccgctgggcggtttcggagcacggcaagcaggccagcgaccggctggtcttcggcaaggtggtgagcggcgaggagcagatcgtcgccgggacgaaatacaagctggtcattcaggcgaccagggccggcgccggcgggaacagcgcgacgtacggggcggtggtgtacgagaaggtcgacaagacacggcagctactgtcgtttagtccggcgaactga

SEQ ID NO: 132 - protein, 126 aa, Sorghum bicolor
  misc_feature: Ceres ANNOT ID no.6067852
  misc_feature: Bit score of 204.2 for HMM based on sequences of FIGURE 3.
  misc_feature (38)..(96): Pfam Name: Cystatin Pfam Description: Cystatin domain
  misc_feature: Functional Homolog Of Ceres CLONE ID no. 560692 at SEQ ID NO. 102
MRTLISMLVVAAAAVVGLCSVAPAASARGEPPVPQAVGGWKPINVNDPHIQELGRWAVSEHGKQASDRLVFGKVVSGEEQIVAGTKYKLVIQATRAGAGGNSATYGAVVYEKVDKTRQLLSFSPAN

SEQ ID NO: 133 - DNA, 375 bp, Sorghum bicolor
  misc_feature: Ceres ANNOT ID no.6067853
  misc_feature: Encodes the peptide sequence at SEQ ID NO. 134
atgagggccctcatttccatgctcatcgtcgccgccgcagttgtggggctgtgctctgtcgctcccgctgcatcagcgcgcgaggcgcccctgccggagaacgtcggcaggtggacgccgatcacggacgtgaacgaccccgaaatccaagagatcggccgatgggcggtttcggagcacgacgcggcggccagcgatagtctggtcttcagcaaggtggtgcgcggcgaggagcaggtcgtcgccgggacgaactacaagctggtcattgaagcgaccaagggcgccggcgggaagatcgcgacgtacggggcggtggtgtacgagaaggttgacaatacgcggcagctactatcgtttgcgccggagaactga

SEQ ID NO: 134 - protein, 124 aa, Sorghum bicolor
  misc_feature: Ceres ANNOT ID no.6067853
  misc_feature: Bit score of 251.4 for HMM based on sequences of FIGURE 3.
  misc_feature (36)..(95): Pfam Name: Cystatin Pfam Description: Cystatin domain
  misc_feature: Functional Homolog Of Ceres CLONE ID no. 560692 at SEQ ID NO. 102
MRALISMLIVAAAVVGLCSVAPAASAREAPLPENVGRWTPITDVNDPEIQEIGRWAVSEHDAAASDSLVFSKVVRGEEQVVAGTNYKLVIEATKGAGGKIATYGAVVYEKVDNTRQLLSFAPEN

SEQ ID NO: 135 - DNA, 348 bp, Sorghum bicolor
  misc_feature: Ceres ANNOT ID no.6075444
  misc_feature: Encodes the peptide sequence at SEQ ID NO. 136
atggcaagcagggcaaggggtggacgcgcacctcccactccctcccccacacaggcagagataggacggctccaaggtggattctatcagccgatagtgaacatcaacgatccgcacgttcaggaggtcggcaggtgggcggtgtcggagcatgtcaagaaggcgaacgacgggctaaaattcagtagagtggtgagcggtcaatatcaagtggtcgagggcttcaactatcgtctcatcatcgatgcaactgatagccatggcaaggttgccaagtatgaggccgtggtgtgggagaaggaatgggagaactttcttcagctcacgtcctttaaaccggctaactga

SEQ ID NO: 136 - protein, 115 aa, Sorghum bicolor
  misc_feature: Ceres ANNOT ID no.6075444
  misc_feature: Bit score of 144.1 for HMM based on sequences of FIGURE 3.
  misc_feature (26)..(115): Pfam Name: Cystatin Pfam Description: Cystatin domain
  misc_feature: Functional Homolog Of Ceres CLONE ID no. 560692 at SEQ ID NO. 102
MASRARGGRAPPTPSPTQAEIGRLQGGFYQPIVNINDPHVQEVGRWAVSEHVKKANDGLKFSRVVSGQYQVVEGFNYRLIIDATDSHGKVAKYEAVVWEKEWENFLQLTSFKPAN

SEQ ID NO: 137 - DNA, 2211 bp, Arabidopsis thaliana
  misc_feature: Ceres LOCUS ID no.At3g45100
  misc_feature: Genomic Sequence
  misc_feature: Inplanta Sequence
  misc_feature: Encodes the peptide sequence at SEQ ID NO. 138
atggcggaaccaccaaagcttagggttttaatggtctctgatttcttcttcccaaactttggtggtgtcgagaatcacatctattacctctctcaatgcttgttaaagctcggtcacaaggtcagattcttctaagttctaaatcaacaaaagttcaaatctttttgcatttttagccataaagaaatcaaattctcaaaacccgtttatgctagttcaatacgatgtgatcagattcaaagttttaaattcaaagtttcaagctttatcatcaatagctgtaatcagattaaaagtttcaggctttatcatcaatagctgtaataaactaatgtagcatagtgtgataggagcttgaggccaaagtttcattctttatctgctttggggcattggtttgagatactgttggttttgttgcaggtggttgttatgacacatgcttatgggaaccggtctggagttagatacatgactggtggactcaaagtctattatgtaccttggagaccttttgttatgcagactacatttccgacggtttatggaacacttcccattgtgaggactatacttagacgcgagaaaatcacggtagttcatggacatcaagctttctctacgctttgtcatgaagctttaatgcatgccaggacaatgggctataaagttgtgttcacagatcattccttgtacggttttgctgatgttggtagcatccatatgaacaaggttttacagtttagtttagcagatattgatcaggcgatttgtgtttcacacacgagcaaggagaatacggttctaaggtctggattgtccccagcaaaggtttttatgataccgaatgctgttgatactgctatgttcaagcccgcttctgttcgacccagtactgatattattactatagttgtcataagtagattggtttatcgaaaaggtgcggatttgctcgtggaagtcattccagaagtatgccgtttatacccaaatgtgagttacaaaaccccagctcacattagtagcagaatcattctgccatttctcattagtatccgcatttactttctttttatttggtttttgaaaggttcgttttgtagttggaggggatggaccaaaacatgtgcgactcgaggaaatgagagagaagcattctctacaagatagagtcgaaatgctaggtgcagttccgcattctcgtgtgcgctctgttttggttaccggtcatattttcttaaacaggtgtgctgattcttacactttttgtgtttaaaattcacaaaactcaacattactttttatcagttaacgctactatagtcttgatcctctgacagttctttaacagaagccttctgcatagctatattagaggcggctagttgcggattattaactgtcagcactcgtgttggaggtgtcccagaggcgtgtaacattttctataattccttcgttgccctttcgctacatcctcatcgtttctttcttcgagattgataaaatcaggttttcttcacggtttacaggtcttaccagatgacatggttgtacttgctgaaccagatccggatgatatggtacgagctattgagaaggcaatatcaatacttccaactattaaccccgaggagatgcacaatcgagtgagttctgcttcaaatccaagcctaacgtatcagtctacttataagagttaagattctcttctaagcctttgatttcctttttttgcttgttgctaccagatgaagaagctctacagttggcaagatgttgctaaaagaaccgagattgtgtatgaccgtgccttgaagtgttcaaataggagtcttctagaacgtctaatgcggtacattatatccttactcatatagattaataatgtaaaccccacccccttcattttctataccgatgaatatctgatcttttgtaggttcctctcgtgtggagcttgggcagggaagctattttgtatggttatgatcctcgattacttgctttggcggttacttcagttactgcaggtgatctatcattgattcatcttctctaatccttgttttttacaaaatgtaatatctctaaatataatggaatttgcctcagcctgatgaagatatcgaggaggcacccgatatctgtctttgccatcaccgaggggttgaggtatctgagggtctaaggaagaagataaagtga

SEQ ID NO: 138 - protein, 447 aa, Arabidopsis thaliana
  misc_feature: Ceres LOCUS ID no.At3g45100
  misc_feature: Bit score of 1228.3 for HMM based on sequences of FIGURE 5.
  misc_feature (187)..(356): Pfam Name: Glycos_transf_1 Pfam Description: Glycosyl transferases group 1
  misc_feature (46)..(135): Pfam Name: PIGA Pfam Description: PIGA (GPI anchor biosynthesis)
MAEPPKLRVLMVSDFFFPNFGGVENHIYYLSQCLLKLGHKVVVMTHAYGNRSGVRYMTGGLKVYYVPWRPFVMQTTFPTVYGTLPIVRTILRREKITVVHGHQAFSTLCHEALMHARTMGYKVVFTDHSLYGFADVGSIHMNKVLQFSLADIDQAICVSHTSKENTVLRSGLSPAKVFMIPNAVDTAMFKPASVRPSTDIITIVVISRLVYRKGADLLVEVIPEVCRLYPNVRFVVGGDGPKHVRLEEMREKHSLQDRVEMLGAVPHSRVRSVLVTGHIFLNSSLTEAFCIAILEAASCGLLTVSTRVGGVPEVLPDDMVVLAEPDPDDMVRAIEKAISILPTINPEEMHNRMKKLYSWQDVAKRTEIVYDRALKCSNRSLLERLMRFLSCGAWAGKLFCMVMILDYLLWRLLQLLQPDEDIEEAPDICLCHHRGVEVSEGLRKKIK

SEQ ID NO: 139 - DNA, 1329 bp, Populus balsamifera subsp. trichocarpa
  misc_feature: Ceres ANNOT ID no.1529516
  misc_feature: Encodes the peptide sequence at SEQ ID NO. 140
atggctgatcagaagcacagaatcctgatggtttcagattttttctttcccaattttggtggtgtcgagagccatatttattatctatctcaatgcctgctaaagcttggtcacaaggtggttgttatgactcatgcttatggtaatcgctctggggtgagatacatgactggtggccttaaagtttactatgtaccatggagaccatttcttatgcagaacaccttgccaactgtttacgggacacttccaattgtaaggactatccttgttcgagaaaaaatatcattggtgcatggacatcaagccttctcaactctttgtcatgaagcgttgatgcatgcacgcaccatgggttacaaagttgtatttactgatcattcactctatggttttgctgatatcggaagcattcacatgaacaaggtgttgcaattcactttagcagacgtgagccaggccatttgtgtttctcatacaagcaaggaaaacacagtgttacggtcaggtctaccaccagaaaaggttttcatgataccaaatgctgttgacactgctatgttcaagccagccccagagcgacttggcaatgatgaaattattattgttgtgataagtagattggtttatcgaaagggcgcagacttgcttgttgaagtcattccagaaatttgccgtttgtatcctaatgtcaggttcattgttggaggagatggacctaaacgggtaaggctggaagagatgagggaaagacactctcttcaagatcgagttgaaatgctgggttctgtaccacatgctcatgtacgctctgtcttgatttctggccatatatttctaaacagttctttgacagaggcgttctgcatagccatattagaggctgctagttgtgggttattaacagtcagcacgcgcgtaggaggtgtacctgaggttctaccagaggacatgattgtacttgcagaacctgatcctagtgatatggtaagagcaaccggaaaggcgatatctctacttccgaatattgacccacaacagatgcataatcgcatgaagaaactctatgattggcatgatgttgcaaaacgaacagagattgtttatgaccgtgctttgaaatgtcccgaccaaaatttgttagaacgactctcacggtacctctcttgtggtagttgggcaggcaagattttctgcttcgttatgataattgatttcttgctatggcgtctgctgcaactatggcagccaacagaggagattgaggaggtgcctgaatttactttaccccgtcaccaagatgaggaaataatctcaaatttcaactag

SEQ ID NO: 140 - protein, 442 aa, Populus balsamifera subsp. trichocarpa
  misc_feature: Ceres ANNOT ID no.1529516
  misc_feature: Bit score of 1242.8 for HMM based on sequences of FIGURE 5.
  misc_feature (186)..(314): Pfam Name: Glycos_transf_1 Pfam Description: Glycosyl transferases group 1
  misc_feature (45)..(134): Pfam Name: PIGA Pfam Description: PIGA (GPI anchor biosynthesis)
  misc_feature: Functional Homolog Of Ceres LOCUS ID no. At3g45100 at SEQ ID NO. 138
MADQKHRILMVSDFFFPNFGGVESHIYYLSQCLLKLGHKVVVMTHAYGNRSGVRYMTGGLKVYYVPWRPFLMQNTLPTVYGTLPIVRTILVREKISLVHGHQAFSTLCHEALMHARTMGYKVVFTDHSLYGFADIGSIHMNKVLQFTLADVSQAICVSHTSKENTVLRSGLPPEKVFMIPNAVDTAMFKPAPERLGNDEIIIVVISRLVYRKGADLLVEVIPEICRLYPNVRFIVGGDGPKRVRLEEMRERHSLQDRVEMLGSVPHAHVRSVLISGHIFLNSSLTEAFCIAILEAASCGLLTVSTRVGGVPEVLPEDMIVLAEPDPSDMVRATGKAISLLPNIDPQQMHNRMKKLYDWHDVAKRTEIVYDRALKCPDQNLLERLSRYLSCGSWAGKIFCFVMIIDFLLWRLLQLWQPTEEIEEVPEFTLPRHQDEEIISNFN

SEQ ID NO: 141 - DNA, 1272 bp, Populus balsamifera subsp. trichocarpa
  misc_feature: Ceres ANNOT ID no.1476065
  misc_feature: Encodes the peptide sequence at SEQ ID NO. 142
atggctgatcagaagcacagaatcctgatggtttcagattttttctttcccaattttggtggtgtcgagagccatatttattatctatctcaatgcctgctaaagcttggtcacaaggtggttgttatgactcatgcttatggtaatcgctctggggtgagatacatgactggtggccttaaagtttactatgtaccatggagaccatttcttatgcagaacaccttgccaactgtttacgggacacttccaattgtaaggactatccttgttcgagaaaaaatatcattggtgcatggacatcaagccttctcaactctttgtcatgaagcgttgatgcatgcacgcaccatgggttacaaagttgtatttactgatcattcactctatggttttgctgatatcggaagcattcacatgaacaaggtgttgcaattcactttagcagacgtgagccaggccatttgtgtttctcatacaagcaaggaaaacacagtgttacggtcaggtctaccaccagaaaaggttttcatgataccaaatgctgttgacactgctatgttcaagccagccccagagcgacttggcaatgatgaaattattattgttgtgataagtagattggtttatcgaaagggcgcagacttgcttgttgaagtcattccagaaatttgccgtttgtatcctaatgtcaggttcattgttggaggagatggacctaaacgggtaaggctggaagagatgagggaaagacactctcttcaagatcgagttgaaatgctgggttctgtaccacatgctcatctcgacaatttcctttggcatggatgtattaaccctgaagtggaaatacaaatagtaacagagcatttggtggaggttctaccagaggacatgattgtacttgcagaacctgatcctagtgatatggtaagagcaaccggaaaggcgatatctctacttccgaatattgacccacaacagatgcataatcgcatgaagaaactctatgattggcatgatgttgcaaaacgaacagagattgtttatgaccgtgctttgaaatgtcccgaccaaaatttgttagaacgactctcacggtacctctcttgtggtagttgggcaggcaagattttctgcttcgttatgataattgatttcttgctatggcgtctgctgcaactatggcagccaacagaggagattgaggaggtgcctgaatttactttaccccgtcaccaagatgaggaaataatctcaaatttcaactag

SEQ ID NO: 142 - protein, 423 aa, Populus balsamifera subsp. trichocarpa
  misc_feature: Ceres ANNOT ID no.1476065
  misc_feature: Bit score of 1149.7 for HMM based on sequences of FIGURE 5.
  misc_feature (186)..(273): Pfam Name: Glycos_transf_1 Pfam Description: Glycosyl transferases group 1
  misc_feature (45)..(134): Pfam Name: PIGA Pfam Description: PIGA (GPI anchor biosynthesis)
  misc_feature: Functional Homolog Of Ceres LOCUS ID no. At3g45100 at SEQ ID NO. 138
MADQKHRILMVSDFFFPNFGGVESHIYYLSQCLLKLGHKVVVMTHAYGNRSGVRYMTGGLKVYYVPWRPFLMQNTLPTVYGTLPIVRTILVREKISLVHGHQAFSTLCHEALMHARTMGYKVVFTDHSLYGFADIGSIHMNKVLQFTLADVSQAICVSHTSKENTVLRSGLPPEKVFMIPNAVDTAMFKPAPERLGNDEIIIVVISRLVYRKGADLLVEVIPEICRLYPNVRFIVGGDGPKRVRLEEMRERHSLQDRVEMLGSVPHAHLDNFLWHGCINPEVEIQIVTEHLVEVLPEDMIVLAEPDPSDMVRATGKAISLLPNIDPQQMHNRMKKLYDWHDVAKRTEIVYDRALKCPDQNLLERLSRYLSCGSWAGKIFCFVMIIDFLLWRLLQLWQPTEEIEEVPEFTLPRHQDEEIISNFN

SEQ ID NO: 143 - DNA, 1000 bp, Arabidopsis thaliana
  misc_feature (1)..(1000): Ceres Promoter PT0633
ttaatctgagtcctaaaaactgttatacttaacagttaacgcatgatttgatggaggagccatagatgcaattcaatcaaactgaaatttctgcaagaatctcaaacacggagatctcaaagtttgaaagaaaatttatttcttcgactcaaaacaaacttacgaaatttaggtagaacttatatacattatattgtaattttttgtaacaaaatgtttttattattattatagaattttactggttaaattaaaaatgaatagaaaaggtgaattaagaggagagaggaggtaaacattttcttctattttttcatattttcaggataaattattgtaaaagtttacaagatttccatttgactagtgtaaatgaggaatattctctagtaagatcattatttcatctacttcttttatcttctaccagtagaggaataaacaatatttagctcctttgtaaatacaaattaattttcgttcttgacatcattcaattttaattttacgtataaaataaaagatcatacctattagaacgattaaggagaaatacaattcgaatgagaaggatgtgccgtttgttataataaacagccacacgacgtaaacgtaaaatgaccacatgatgggccaatagacatggaccgactactaataatagtaagttacattttaggatggaataaatatcataccgacatcagtttgaaagaaaagggaaaaaaagaaaaaataaataaaagatatactaccgacatgagttccaaaaagcaaaaaaaaagatcaagccgacacagacacgcgtagagagcaaaatgactttgacgtcacaccacgaaaacagacgcttcatacgtgtccctttatctctctcagtctctctataaacttagtgagaccctcctctgttttactcacaaatatgcaaactagaaaacaatcatcaggaataaagggtttgattacttctattggaaagaaaaaaatctttggaaaa

SEQ ID NO: 144 - protein, 450 aa, Arabidopsis thaliana
  misc_feature: Public GI ID no.6911848
  misc_feature: Bit score of 1210.0 for HMM based on sequences of FIGURE 5.
  misc_feature (187)..(342): Pfam Name: Glycos_transf_1 Pfam Description: Glycosyl transferases group 1
  misc_feature (46)..(135): Pfam Name: PIGA Pfam Description: PIGA (GPI anchor biosynthesis)
  misc_feature: Functional Homolog Of Ceres LOCUS ID no. At3g45100 at SEQ ID NO. 138
MAEPPKLRVLMVSDFFFPNFGGVENHIYYLSQCLLKLGHKVVVMTHAYGNRSGVRYMTGGLKVYYVPWRPFVMQTTFPTVYGTLPIVRTILRREKITVVHGHQAFSTLCHEALMHARTMGYKVVFTDHSLYGFADVGSIHMNKVLQFSLADIDQAICVSHTSKENTVLRSGLSPAKVFMIPNAVDTAMFKPASVRPSTDIITIVVISRLVYRKGADLLVEVIPEVCRLYPNVRFVVGGDGPKHVRLEEMREKHSLQDRVEMLGAVPHSRVRSVLVTGHIFLNSSLTEAFCIAILEAASCGLLTVSTRVGGFLHGLQVLPDDMVVLAEPDPDDMVRAIEKAISILPTINPEEMHNRMKKLYSWQDVAKRTEIVYDRALKCSNRSLLERLMRFLSCGAWAGKLFCMVMILDYLLWRLLQLLQPDEDIEEAPDICLCHHRGVEVSEGLRKKIK

SEQ ID NO: 145 - DNA, 1753 bp, Zea mays
  misc_feature: Ceres CLONE ID no.243208
  misc_feature: Encodes the peptide sequence at SEQ ID NO. 146
ctcgaatcgtcaatgagcaccggcgccgcgcccctcctccactctacccgcacagcgcccctcgcccccacaccccaacccaaccatccgctccttgtcgccttccgacgctgagtttgctggtgtcgatttgcgccggcggatgctcgatctggtagctgcatgtgccgacctactcgtcgaatccgttatctaacgtaatggatgggcaaggcacaaagcacaggattttgatggtgtccgactttttctttccaaactttggtggggtggaaagccatatctactacctgtcacaatgtctacttaagcttggccataaggttgttgtcatgacacatgcatatggaaacagatctggagtacgatatgtcacaaatggtttaaaggtctattatgtaccatggaggccattcctgatgcagaatacacttcctacactatccttgacgtttccaattgtaaggacaattattattcgagagaagatttctgtcgtgcatggacatcaagctttttcaacactgtgtcatgaagcattaatgcatgctaggacaatggggtacaaagttgtcttcacagatcactcactttatggttttgctgatgctggaagcattcacatgaataaggttctgcagtttactcttgcagatattgatcaggcaatatgtgtctcacatacaagcaaagagaacactgtcttgaggttagtataccgaaaaggcgccgaccttcttgttgaagtcattccagaagtgtgtcggctatttccaaaggttcactttattgttggtggtgatggtccaaaacgtgtgcgccttgaagaaatgagggagaagttctcccttcaggatagagttgagatgttaggagctgtacctcatgctcaggtgcgatcggttctgatatctggacatatatttttgaacagttcactcacagaggcattttgcatagccattctagaagcagctagctgtggactgttgacagtgagcactagagtcggtggtgtccctgaggttcttccagatgacatgatagtacttgcagaaccagctcctggagatatggtaagagctgtcaagaaagccatcgacatgctacctggaatagacccccagattatgcatcttcggatgaaagaactttatagttgggacgatgttgccaaaagaactgagattgtttatgatcgtgcaatggaatctccaacaacaaatttactagatcgccttccccggtatcttacttgtggatcttgggctggaaaactgttttgcctagttatgatcatcaattacctactatggcgccttttagaatttctacagcctgctgtaggtattgaagaagtcccagatataggcccactacatgctcatttaggttcaaggaatgatgaggctcaagagaagtgaaacttaaacctttgtcagttttgaaactgttggggacttgaggtggcagtcatggtatcttctgcttgtcagcattcgttctgatccacatgccagtgtatgcctttatgatatggcccccgcacagcattttctcttgaagcttcctgtctccgtagtcgcagctgaaagagagtggaacgccttgatttgtaggatttcttgtcatgctggttaaagatatggtccgagtctctgtcattgccagcttctttttcttcttctgcgtaatgcgtagtgagtggatggcctgcgttttaggcacgtcatcaaaaccaattatctgctgg

SEQ ID NO: 146 - protein, 407 aa, Zea mays
  misc_feature: Ceres CLONE ID no.243208
  misc_feature: Bit score of 1095.1 for HMM based on sequences of FIGURE 5.
  misc_feature (170)..(300): Pfam Name: Glycos_transf_1 Pfam Description: Glycosyl transferases group 1
  misc_feature (47)..(136): Pfam Name: PIGA Pfam Description: PIGA (GPI anchor biosynthesis)
  misc_feature: Functional Homolog Of Ceres LOCUS ID no. At3g45100 at SEQ ID NO. 138
MDGQGTKHRILMVSDFFFPNFGGVESHIYYLSQCLLKLGHKVVVMTHAYGNRSGVRYVTNGLKVYYVPWRPFLMQNTLPTLSLTFPIVRTIIIREKISVVHGHQAFSTLCHEALMHARTMGYKVVFTDHSLYGFADAGSIHMNKVLQFTLADIDQAICVSHTSKENTVLRLVYRKGADLLVEVIPEVCRLFPKVHFIVGGDGPKRVRLEEMREKFSLQDRVEMLGAVPHAQVRSVLISGHIFLNSSLTEAFCIAILEAASCGLLTVSTRVGGVPEVLPDDMIVLAEPAPGDMVRAVKKAIDMLPGIDPQIMHLRMKELYSWDDVAKRTEIVYDRAMESPTTNLLDRLPRYLTCGSWAGKLFCLVMIINYLLWRLLEFLQPAVGIEEVPDIGPLHAHLGSRNDEAQEK

SEQ ID NO: 147 - protein, 438 aa, Oryza sativa subsp. japonica
  misc_feature: Public GI ID no.22296298
  misc_feature: Bit score of 1118.5 for HMM based on sequences of FIGURE 5.
  misc_feature (210)..(360): Pfam Name: Glycos_transf_1 Pfam Description: Glycosyl transferases group 1
  misc_feature (68)..(157): Pfam Name: PIGA Pfam Description: PIGA (GPI anchor biosynthesis)
  misc_feature: Functional Homolog Of Ceres LOCUS ID no. At3g45100 at SEQ ID NO. 138
MENVTGEGISDQIERFQTQLQMDGRGRKHRILMVSDFFFPNFGGVESHIYYLSQCLLKLGHKVIVMTHAYGNRSGVRYVTGGLKVYYVPWKPFLMQNTLPTLFLTFPIVRTILIREKISVVHGHQAFSTLCHEALMHARTMGYKVVFTDHSLYGFADAGSIHMNKVLQFTLADIDQAICVSHTSKENTVLRSGISPEKVFMVPNAVDTAMFTPSPDRLSCDEIVIVVISRLVYRKGADLLVEVIPEVCRLFPKVRFIVGGDGPKRVRIEEMREKFSLQDRVEMLGAVPHAQVRSVLISGHIFLNSSLTEAFCIAILEAASCGLLTVSTRVGGVPEVLPDDMVVLAEPAPEDMVRAVRKAIDMLPGIDPQVMHLRMKKLYSWDDVAKRTEIVYDRAMQSPQTDLLERLPRSGGNLTSSFPLSPLKVLKRSQISGQYMLV

SEQ ID NO: 148 - DNA, 1677 bp, Arabidopsis thaliana
  misc_feature: Ceres LOCUS ID no.At4g00150
  misc_feature: Genomic Sequence
  misc_feature: Inplanta Sequence
  misc_feature: Encodes the peptide sequence at SEQ ID NO. 149
atgcccttaccctttgaagagtttcaagggaaggggatttcttgtttctcttctttctcgtcttccttcccccaaccaccgtcgtctccgcttttgagccaccgcaaagcaagaggcggcgaagaagaagaggaagaagttcccgcggcggagcctacctctgttctggactccctcataagcccaacctcttcctccacggtgtcttcctctcacggcggaaacagcgccgtcggaggcggcggcgacgccaccaccgatgagcaatgcggagccattgggttgggtgattgggaggagcaagttcctcatgaccacgaacagagcattctcggactcatcatgggagattccacagatccctctcttgaactcaacagcattctccagacatctcccaccttccacgactctgactactcatcacccggtttcggagtcgtcgacaccggcttcggtttagaccaccactctgttccgccgtcacatgtttccggtcttctgatcaaccaaagtcaaacccactacacacagaatcctgcggctatcttctacggccaccaccaccatacacctccgccggcaaagcggcccaaccctggtcccgtggggataacagagcagctggttaaggcagcagaggtcatagagagcgacacgtgtctagctcaggggatattggcgcggctcaatcaacagctctcttctcccgtcgggaagccattagaaagagcagctttttacttcaaagaagctctcaataatctccttcacaacgtctcccaaaccctaaacccttattccctcatcttcaagatcgctgcttacaaatccttctcagagatctctcccgttcttcagttcgccaactttacctccaaccaagccctcttagagtccttccatggcttccaccgtctccacatcatcgacttcgatatcggctacggtggccaatgggcttccctcatgcaagagcttgttctccgcgacaacgccgctcctctctccctcaagatcaccgttttcgcttctccggcgaaccacgaccagctcgaacttggcttcactcaagacaacctcaagcacttcgcctctgagatcaacatctcccttgacatccaagttttgagcttagacctcctcggctccatctcgtggcctaactcgtcggagaaagaagctgtcgccgttaacatctccgccgcgtccttctcgcacctccctttggtcctccgtttcgtgaagcatctatctccgacgatcatcgtctgctccgacagaggatgcgagaggacggatctgcccttctctcaacagctcgcccactcgctgcactcacacaccgctctcttcgaatccctcgacgccgtcaacgccaacctcgacgcaatgcagaagatcgagaggtttcttatacagccggagatagagaagctggtgttggatcgtagccgtccgatagaacggccgatgatgacgtggcaagcgatgtttctacagatgggtttctcaccggtgacgcacagtaacttcacggagtctcaagccgagtgtttagtccaacggacgccagtgagaggctttcacgtcgagaagaaacataactcacttctcctatgttggcaaaggacagaactcgtcggagtttcagcatggagatgtcgctcctcctga

SEQ ID NO: 149 - protein, 558 aa, Arabidopsis thaliana
  misc_feature: Ceres LOCUS ID no.At4g00150
  misc_feature: Bit score of 1169.8 for HMM based on sequences of FIGURE 6.
  misc_feature (179)..(467): Pfam Name: GRAS Pfam Description: GRAS family transcription factor
MPLPFEEFQGKGISCFSSFSSSFPQPPSSPLLSHRKARGGEEEEEEVPAAEPTSVLDSLISPTSSSTVSSSHGGNSAVGGGGDATTDEQCGAIGLGDWEEQVPHDHEQSILGLIMGDSTDPSLELNSILQTSPTFHDSDYSSPGFGVVDTGFGLDHHSVPPSHVSGLLINQSQTHYTQNPAAIFYGHHHHTPPPAKRPNPGPVGITEQLVKAAEVIESDTCLAQGILARLNQQLSSPVGKPLERAAFYFKEALNNLLHNVSQTLNPYSLIFKIAAYKSFSEISPVLQFANFTSNQALLESFHGFHRLHIIDFDIGYGGQWASLMQELVLRDNAAPLSLKITVFASPANHDQLELGFTQDNLKHFASEINISLDIQVLSLDLLGSISWPNSSEKEAVAVNISAASFSHLPLVLRFVKHLSPTIIVCSDRGCERTDLPFSQQLAHSLHSHTALFESLDAVNANLDAMQKIERFLIQPEIEKLVLDRSRPIERPMMTWQAMFLQMGFSPVTHSNFTESQAECLVQRTPVRGFHVEKKHNSLLLCWQRTELVGVSAWRCRSS

SEQ ID NO: 150 - DNA, 1926 bp, Populus balsamifera subsp. trichocarpa
  misc_feature: Ceres ANNOT ID no.1539565
  misc_feature: Encodes the peptide sequence at SEQ ID NO. 151
atgcccctaccctctgaggactttcaagggaagggggtgttagatttctcttcgtctactacttcctctccaaattcactgtatcaacaccaccagaagtggcagaacaacaacagcaaagaaagttgtggtttttttttgggcagtgctgagcccacatctgtgcttgatacaataagcagacaaagcccaccaacatcgtcctcaacactgtcttcttctcaaggcggaggtggtggcggcggaggagcctccaccgacaccaccaacgacgtggcagcagctggtggaagcaacccttgtgtagatgaaaaatgtggacagcaacttggaatggaggattgggagagtgtgttgccaggttctcctagtcaagagcagtcaattttaaggctaattatgggtgatattgaggacccatccgtgggacttcacaaactgttacaaggtggaagtaggtctctagatatggagcatgcgtcgggttttggtgttgtagatcaagtttttggctttgatgtatccagtatgagttctgcaagtgccaatttggttgccaacaacaacaacattgatccttcttcaatccatgagcatcataataaccagcatttcttatcaccaccgccgtcgaaaaggcttaattctgggcttgttggagtcaattatgtgccaaaagtctttgattcgaggcctccagagttgtttcttccacgacaacatcaacagcagcagcagaatcatcagtttcgaatgttgcagcagcagcagcagaggcagggagtgatcacgaatcagaaaattgcaagcgatgaattggcaaaccagcagcagcttcaacaggcaataataaacccgatatgtcaagcagcagagctgatcgaaactgggaatccggtacttgcgcaagggatattggcgcggctcaatcaccagctctctcttcctatcggtaagccttaccaaaggactgctttttacttcaaggatgccttgcagttgcttctccatacgagcagcaacaactcaattgataatgcttgtagcctgattttcaagatcggtgcttataaatctttctctgagatctcaccaatccttcagtttgcgaattttacttgcaaccaagttcttctcgaggcttctgagggttttgagagaattcatattgttgattttgatattggatatggtggacaatgggcttctcttatgcaagaactggctttgaggactggaggtgccccttctcttaaaatcacagcttttgcttctccttcctcacatgatgagctcgagcttggtttcactcgagaaaatttaagaatctttgcaagtgaaatcaacatgccattcgagcttgaaattttaagccttgaatccttgggttctggttcttggccaatgcctcttcgcacgccggaaaaggaagtaactgctgtgaatcttccaattggctccttttcaaatgacacatcaactcttcctttggcgcttcgctttgtaaagcaactctcacccaaagtcgtggtctctttggacagaggctgtgaccgaagcgacctcccatttgcgcaccatgtaaatcatgccattcaatcttattcaaccctgctggaatcactggatgccgtgaatgtgaacctagatgcattgcaaaagattgagagttttttggtgcagccaggtattgagaaaattgtattgggtcgtcatcgttgccctgataggacttctccttggaggagtctctttttacagtctggtttcactccattgcctttcagtaactttaccgagtcacaagccgagtatttggtgcatcgtactccagttaggggtttccatgtcgaaaagaggcaatcttcgcttgttctttgctggcaacggaaggacctcatagcagcttctgcttggaggtgttaa

SEQ ID NO: 151 - protein, 641 aa, Populus balsamifera subsp. trichocarpa
  misc_feature: Ceres ANNOT ID no.1539565
  misc_feature: Bit score of 1403.2 for HMM based on sequences of FIGURE 6.
  misc_feature (289)..(555): Pfam Name: GRAS Pfam Description: GRAS family transcription factor
  misc_feature: Functional Homolog Of Ceres LOCUS ID no. At4g00150 at SEQ ID NO. 149
MPLPSEDFQGKGVLDFSSSTTSSPNSLYQHHQKWQNNNSKESCGFFLGSAEPTSVLDTISRQSPPTSSSTLSSSQGGGGGGGGASTDTTNDVAAAGGSNPCVDEKCGQQLGMEDWESVLPGSPSQEQSILRLIMGDIEDPSVGLHKLLQGGSRSLDMEHASGFGVVDQVFGFDVSSMSSASANLVANNNNIDPSSIHEHHNNQHFLSPPPSKRLNSGLVGVNYVPKVFDSRPPELFLPRQHQQQQQNHQFRMLQQQQQRQGVITNQKIASDELANQQQLQQAIINPICQAAELIETGNPVLAQGILARLNHQLSLPIGKPYQRTAFYFKDALQLLLHTSSNNSIDNACSLIFKIGAYKSFSEISPILQFANFTCNQVLLEASEGFERIHIVDFDIGYGGQWASLMQELALRTGGAPSLKITAFASPSSHDELELGFTRENLRIFASEINMPFELEILSLESLGSGSWPMPLRTPEKEVTAVNLPIGSFSNDTSTLPLALRFVKQLSPKVVVSLDRGCDRSDLPFAHHVNHAIQSYSTLLESLDAVNVNLDALQKIESFLVQPGIEKIVLGRHRCPDRTSPWRSLFLQSGFTPLPFSNFTESQAEYLVHRTPVRGFHVEKRQSSLVLCWQRKDLIAASAWRC

SEQ ID NO: 152 - DNA, 1935 bp, Populus balsamifera subsp. trichocarpa
  misc_feature: Ceres ANNOT ID no.1486151
  misc_feature: Encodes the peptide sequence at SEQ ID NO. 153
atgaaggccatgcccctaccctctgaggactttcaagggaagggggtgttagatttctcttcgtctactacttcctctccaaattcactgtatcaacaccaccagaagtggcagaacaacaacagcaaagaaagttgtggtttttttttgggcagtgctgagcccacatctgtgcttgatacaataagcagacaaagcccaccaacatcgtcctcaacactgtcttcttctcaaggcggaggtggtggcggcggaggagcctccaccgacaccaccaacgacgtggcagcagctggtggaagcaacccttgtgtagatgaaaaatgtggacagcaacttggaatggaggattgggagagtgtgttgccaggttctcctagtcaagagcagtcaattttaaggctaattatgggtgatattgaggacccatccgtgggacttcacaaactgttacaaggtggaagtaggtctctagatatggagcatgcgtcgggttttggtgttgtagatcaagtttttggctttgatgtatccagtatgagttctgcaagtgccaatttggttgccaacaacaacaacattgatccttcttcaatccatgagcatcataataaccagcatttcttatcaccaccgccgtcgaaaaggcttaattctgggcttgttggagtcaattatgtgccaaaagtctttgattcgaggcctccagagttgtttcttccacgacaacatcaacagcagcagcagaatcatcagtttcgaatgttgcagcagcagcagcagaggcagggagtgatcacgaatcagaaaattgcaagcgatgaattggcaaaccagcagcagcttcaacaggcaataataaacccgatatgtcaagcagcagagctgatcgaaactgggaatccggtacttgcgcaagggatattggcgcggctcaatcaccagctctctcttcctatcggtaagccttaccaaaggactgctttttacttcaaggatgccttgcagttgcttctccatacgagcagcaacaactcaattgataatgcttgtagcctgattttcaagatcggtgcttataaatctttctctgagatctcaccaatccttcagtttgcgaattttacttgcaaccaagttcttctcgaggcttctgagggttttgagagaattcatattgttgattttgatattggatatggtggacaatgggcttctcttatgcaagaactggctttgaggactggaggtgccccttctcttaaaatcacagcttttgcttctccttcctcacatgatgagctcgagcttggtttcactcgagaaaatttaagaatctttgcaagtgaaatcaacatgccattcgagcttgaaattttaagccttgaatccttgggttctggttcttggccaatgcctcttcgcacgccggaaaaggaagtaactgctgtgaatcttccaattggctccttttcaaatgacacatcaactcttcctttggcgcttcgctttgtaaagcaactctcacccaaagtcgtggtctctttggacagaggctgtgaccgaagcgacctcccatttgcgcaccatgtaaatcatgccattcaatcttattcaaccctgctggaatcactggatgccgtgaatgtgaacctagatgcattgcaaaagattgagagttttttggtgcagccaggtattgagaaaattgtattgggtcgtcatcgttgccctgataggacttctccttggaggagtctctttttacagtctggtttcactccattgcctttcagtaactttaccgagtcacaagccgagtatttggtgcatcgtactccagttaggggtttccatgtcgaaaagaggcaatcttcgcttgttctttgctggcaacggaaggacctcatagcagcttctgcttggaggtgttaa

SEQ ID NO: 153 - protein, 644 aa, Populus balsamifera subsp. trichocarpa
  misc_feature: Ceres ANNOT ID no.1486151
  misc_feature: Bit score of 1403.2 for HMM based on sequences of FIGURE 6.
  misc_feature (292)..(558): Pfam Name: GRAS Pfam Description: GRAS family transcription factor
  misc_feature: Functional Homolog Of Ceres LOCUS ID no. At4g00150 at SEQ ID NO. 149
MKAMPLPSEDFQGKGVLDFSSSTTSSPNSLYQHHQKWQNNNSKESCGFFLGSAEPTSVLDTISRQSPPTSSSTLSSSQGGGGGGGGASTDTTNDVAAAGGSNPCVDEKCGQQLGMEDWESVLPGSPSQEQSILRLIMGDIEDPSVGLHKLLQGGSRSLDMEHASGFGVVDQVFGFDVSSMSSASANLVANNNNIDPSSIHEHHNNQHFLSPPPSKRLNSGLVGVNYVPKVFDSRPPELFLPRQHQQQQQNHQFRMLQQQQQRQGVITNQKIASDELANQQQLQQAIINPICQAAELIETGNPVLAQGILARLNHQLSLPIGKPYQRTAFYFKDALQLLLHTSSNNSIDNACSLIFKIGAYKSFSEISPILQFANFTCNQVLLEASEGFERIHIVDFDIGYGGQWASLMQELALRTGGAPSLKITAFASPSSHDELELGFTRENLRIFASEINMPFELEILSLESLGSGSWPMPLRTPEKEVTAVNLPIGSFSNDTSTLPLALRFVKQLSPKVVVSLDRGCDRSDLPFAHHVNHAIQSYSTLLESLDAVNVNLDALQKIESFLVQPGIEKIVLGRHRCPDRTSPWRSLFLQSGFTPLPFSNFTESQAEYLVHRTPVRGFHVEKRQSSLVLCWQRKDLIAASAWRC

SEQ ID NO: 154 - protein, 558 aa, Arabidopsis thaliana
  misc_feature: Public GI ID no.15236725
  misc_feature: Bit score of 1165.8 for HMM based on sequences of FIGURE 6.
  misc_feature (179)..(467): Pfam Name: GRAS Pfam Description: GRAS family transcription factor
  misc_feature: Functional Homolog Of Ceres LOCUS ID no. At4g00150 at SEQ ID NO. 149
MPLPFEEFQGKGISCFSSFSSSFPQPPSSPLLSHRKARGGEEEEEEVPAAEPTSVLDSLISPTSSSTVSSSHGGNSAVGGGGDATTDEQCGAIGLGDWEEQVPHDHEQSILGLIMGDSTDPSLELNSILQTSPTFHDSDYSSPGFGVVDTGFGLDHHSVPPSHVSGLLINQSQTHYTQNPAAIFYGHHHHTPPPAKRLNPGPVGITEQLVKAAEVIESDTCLAQGILARLNQQLSSPVGKPLERAAFYFKEALNNLLHNVSQTLNPYSLIFKIAAYKSFSEISPVLQFANFTSNQALLESFHGFHRLHIIDFDIGYGGQWASLMQELVLRDNAAPLSLKITVFASPANHDQLELGFTQDNLKHFASEINISLDIQVLSLDLLGSISWPNSSEKEAVAVNISAASFSHLPLVLRFVKHLSPTIIVCSDRGCERTDLPFSQQLAHSLHSHTALFESLDAVNANLDAMQKIERFLIQPEIEKLVLDRSRPIERPMMTWQAMFLQMGFSPVTHSNFTESQAECLVQRTPVRGFHVEKKHNSLLLCWQRTELVGVSAWRCRSS

SEQ ID NO: 155 - protein, 721 aa, Petunia x hybrida
  misc_feature: Public GI ID no.22087131
  misc_feature: Bit score of 1627.2 for HMM based on sequences of FIGURE 6.
  misc_feature (371)..(635): Pfam Name: GRAS Pfam Description: GRAS family transcription factor
  misc_feature: Functional Homolog Of Ceres LOCUS ID no. At4g00150 at SEQ ID NO. 149
MIAIPQGAKGVLGVSSFMPSISSEEQICKKDANFARNDPQICKKDGNFARNEPQICKKEGNFTRNEPVSVLDTRSPSPSSSSCSYAGKVEGQKEELVKELQPFPLVGLEPEKCSLGFGDLDNLLPELCGADQTLLRWISGDMEDPSVSLKQLLLGGNANGFHGSSGFEASAAGSLVHTDNVSFSGSDVSLNANIEKIGSVIDSNGRPSNGFDYLNANLYAKSLPLPPASSFQEQKLGQKPQSFSPNQALFQNASYGNMFDSSSYDDTNQEQPPSKRHNSGTLGSSVGGLLPKVPFFDPSGDLSMRRQLLGEMQQHFNLLPPQQFQPKPLIVPKLEAACGGGNGSLMVPRHQQQEQQFIYDQIFQASELLLAGHFSNAQMILARLNQQLSPIGKPFKRAAFYFKEALQLPFLLPCTSTFLPPRSPTPFDCVLKMDAYKSFSEVSPLIQFMNFTSNQAILEALGDVERIHIIDFDIGFGAQWSSFMQELPSSNRKATSLKITAFASPSTHHSVEIAIMHESLTQFANDAGIRFELEVINLDTFDPKSYPLSSLRSSDCEAIAINFPIWSISSCLFAFPSLLHYMKQLSPKIIVSLERGCERTELPLKHHLLHALQYYEILLASIDAANVTPEIGKKIEKSLLLPSIENMVLGRLRSPDRMPQWRNLFASAGFSPVAFSNLTEIQAECVVKRTQVGGFHVEKRQSSLVLCWKQQELLSALTWRC

SEQ ID NO: 156 - DNA, 2395 bp, Triticum aestivum
  misc_feature: Ceres CLONE ID no.788036
  misc_feature: Encodes the peptide sequence at SEQ ID NO. 157
actactaggactgtgcactactaatggccccgtagactccacaccagagccaactttggagggagcgagcgacgagggagaagaggtcgacggaggaaggagaagactagactagaccagcacaagcacccaactcttgctgcgtggcggggattggtggtatgaggtgttgctgccgggctagatgagaggaatgccctttgctggagagggtcacgcggggacactgcagcagcccaagctgagcgccggcttctgggcggagcccacgtccgtgctcgaccgccgccacagccccagccccagcccgccctccgaggcttccgcgctgtcgtccgaggtggcgagcctcgcgcccggcggcgacgccaagaacgtctccccgccgccgcagcagcaggcatggccggctggggaggatgctactgctgctgcgccgggggtcaaggaggagtgggcgcaccagctggccccgctcgacatgggcatggaccttggcgccggcgaggggtgggacggcacggcgccttccgggctcgcgggacctgacagcaccttcctccgctggatcattggcggcggggaggacgcgtccgcggggatggccggcgtcatggatccgcctgctctggagctcgaccacgccacgtctatgatgtcgccgcctgcggcgtctctcgggcccagcctgtcgccgttcgcgccggccatggaggacgccaagggggcccctttcggccacgcgcccagcttcctgctccaccagcaccagcaccacccccagccacacgcggccttctttggcgcgcacccgtccttcgagtcggcgccgccgccgcctaagcgccaccacccgatggcaggcgcgccggcgccgaagctgcctgctttccaggggcatcacgctccggcgggcgggttcttccccgccctgaagcccaaggcggggacagcgaacgacgaggcggccgccacggtggaccagctcgccgaggctgccaagtttgccgaggcgggcgacgccttcggcgcacgcgagatattggcgcggctcaattatcggctccccgccgcccccgcggccgggacgccactcctccgctctgccttctacttcaaggaggctttgcgccttgcgctctccccaaacggagagacgcccgcgccgccggcgtccacgccgtacgacgtggtcctcaagctcggcgcgtacaaggccttctccgaggtctccccggtgctccagttcgcgcacctcacctgcgtccaggcggtgctcgacgggctccgcggcgcaggctgcatccacgtgctcgacttcgacatcggcatgggcgagcagtgggcgtcgctgatgcaggagctcgcgcagcgccgcccggcgacggcgctcaaggtcaccgcattggtctcgccggcgtcgcaccacccgctcgagctgcagctcatccacgagaacctatcctgcttcgccgcggagctcggcgtgttcttccagttcaccgtattcaacatcgacaccctcgaccccgcggagctcgtggccatcgccggcggggacgcgctcgccgtccacctccccgtcggcgcagcacacgcggccgcaatgcccgccgtcctccgcctcgtgaagagcctcggcgccaaggtggtcgtgtccgtggaccgcgggtgcgaccgcacggagctgcccttcgccgcccacctgttccaggcgttccagtccaccgtgttcctccttgagtccgtggacgccgtggtcacggacccggacacggccggcaagatcgagcggttcctggtccagccggccgtggagcaatgcgtggtcgggcgccaccgcgcgtccatcgagaaggcgccgctgccgtggcgggccgtgttcgcgtcggccgggttcacgccggtgcaggccagcacgttcgcggagtcgcaggccgagtcgctgctgcacaaggtgcccgtccgggggttccgcgtcgagaagcgcgccccgggatcgctctgcctctactggcagcgcgccgagctcgtgtcagtctcggcgtggcggtgctgacaaccccgacctcgccggcgccgtcgccggcgccaaaagaagccgatcggtcttagttaggactaatgatcctactacaaagtatttcgtcgttgtaatgatccgaatccgtctcgcttagtgtcctaaattggaagactatgttaatggtgtcgccttgcatttgccgctggttgctcgatatgctcaaactgtggtgtcagttgatcacgagtagaattggcatggcttggcaggttgcagggtgtgtgcgtgtcgtggtgcactgcgtttctactttctatcctctacgtgttgctactctatagctgtgaaatcaatggttatggcgttttc

SEQ ID NO: 157 - protein, 624 aa, Triticum aestivum
  misc_feature: Ceres CLONE ID no.788036
  misc_feature: Bit score of 1371.5 for HMM based on sequences of FIGURE 6.
  misc_feature (238)..(535): Pfam Name: GRAS Pfam Description: GRAS family transcription factor
  misc_feature: Functional Homolog Of Ceres LOCUS ID no. At4g00150 at SEQ ID NO. 149
MRGMPFAGEGHAGTLQQPKLSAGFWAEPTSVLDRRHSPSPSPPSEASALSSEVASLAPGGDAKNVSPPPQQQAWPAGEDATAAAPGVKEEWAHQLAPLDMGMDLGAGEGWDGTAPSGLAGPDSTFLRWIIGGGEDASAGMAGVMDPPALELDHATSMMSPPAASLGPSLSPFAPAMEDAKGAPFGHAPSFLLHQHQHHPQPHAAFFGAHPSFESAPPPPKRHHPMAGAPAPKLPAFQGHHAPAGGFFPALKPKAGTANDEAAATVDQLAEAAKFAEAGDAFGAREILARLNYRLPAAPAAGTPLLRSAFYFKEALRLALSPNGETPAPPASTPYDVVLKLGAYKAFSEVSPVLQFAHLTCVQAVLDGLRGAGCIHVLDFDIGMGEQWASLMQELAQRRPATALKVTALVSPASHHPLELQLIHENLSSFAAELGVFFQFTVFNIDTLDPAELVAIAGGDALAVHLPVGAAHAAAMPAVLRLVKSLGAKVVVSVDRGCDRTELPFAAHLFQAFQSTVFLLESVDAVVTDPDTAGKIERFLVQPAVEQCVVGRHRASIEKAPLPWRAVFASAGFTPVQASTFAESQAESLLHKVPVRGFRVEKRAPGSLCLYWQRAELVSVSAWRC

SEQ ID NO: 158 - DNA, 1960 bp, Zea mays
  misc_feature: Ceres CLONE ID no.282885
  misc_feature: Encodes the peptide sequence at SEQ ID NO. 159
atcgtgctctgctcactctctccaagaccaaatgacatgcgttgcgttgcgttgcttgctagcaacttgatatattcttgctgccatgccaatcgtcggtgctgatcctaatcatcctgtctaagctcagacgacgacacatcgagggatgcccctcgccggagccgcgacggccgcgaacctgccacgactcgccccctacgcccaagtaccagcccgcccaccacgctgtcttcgccactcggcatcgccgacgtggcggccctcgccgacgccgacgccgacgccaagagcgtctccccgcccgcatggccggacgacgacgacgacgacgtsgccgggagggacgactgggtccaccatctcccgccccttgacatgcacatgccgccgctcggcctcggcgccgcaaaggcctgggagccccacgcgcaacctccgggtccgggcggcctcaccctctcgcacgcccagcagacccacgacagcaccttcctcggctggtttattgccgacgacgtcgccatgtcgggcgtcatggacgaccacaactcccactcggtacttcatgacctcgaccacataccctcttcctccgtgccgccgccgcagttccagcctctcgcgccccacgtgcactacccgcccaagctgcaccaccaccaaaaccccgtggtgcccgcgtcgcctcccaagcacacgctcctgaaacccaagccggaggcgccggggaccgacgacgcttccacggcggtggaccagctcgccgaggccgccaagcttgccgaagccggagacgttttcggcgcccgcgagatactggcgcggctcaactacctgctcccgcccggcgccgcgacggcgacgccactgctccgctccgccttctacttcaaggaggctctgcgcgctgccctgtccaccaccgcctccgcaaccgccgccgccgccgccgcgccggtggacgtgctcctaaagctcggtgcctacaaggacttctccgagctctgccccgtgctccagttcgcgcacttcacctgcgtccaggccatgctcgacgagctgggtggcgctgcctgcatccacgtgctggacttggacatcggcgtcggcgagcagtgggcgtcgctcatgcaggagctggccagccgccgcccgggcgccgcgctcaaggtcaccgcattggtgtccgcggcgtcgcaccacccgctggagctgcagctcgtccacgagaacctgtccaacttcgcggccgagacccgcgtcccgttccagctggccttcttcaacctcgacgccatggaccccgcggagctcctcgctaccgccgccggcgacgccgtcgccgtccacctcccggccggctccgtgcacgcccccgcggtgccgtccgtccttcacctcgtcaggcggcttggcgccaagcttgtcgtctccgtggaccgcagctgtgaccgcggcgagctgcccttcgccgcgcacttccagtcctgcgtgttcctgctcgagtccctggacgccgtcggcacgggccccgacatcaccgccaagatcgagcgcttcttgatccagccgaggatcgagaggtgcctggcggagaggtaccgcgccgcggcggcgggcgacaagacgccgccctggcgggcaatgctcgtgtcggccggcttcgtgccggtgcaggcaagcagcttggcggaggcgcaggcggaggcgttgctcaagaaggtgcccgtgcggggcttccgcgtcgagaagcgcgccggctcgctcgtcctgcattggcaacgcggggagctgctctccgtgtccgcctggagatgctagcaccttactgctgctcaatctgccattgtttaaggatcctgatatatttatcttagatagaatccacaagtctgctcatgctttgtacaatcaaatgggggttatatggtgtatgaaatgttcccttcactcagac

SEQ ID NO: 159 - protein, 481 aa, Zea mays
  misc_feature: Ceres CLONE ID no.282885
  misc_feature: Bit score of 925.8 for HMM based on sequences of FIGURE 6.
  misc_feature (99)..(392): Pfam Name: GRAS Pfam Description: GRAS family transcription factor
  misc_feature: Functional Homolog Of Ceres LOCUS ID no. At4g00150 at SEQ ID NO. 149
MHMPPLGLGAAKAWEPHAQPPGPGGLTLSHAQQTHDSTFLGWFIADDVAMSGVMDDHNSHSVLHDLDHIPSSSVPPPQFQPLAPHVHYPPKLHHHQNPVVPASPPKHTLLKPKPEAPGTDDASTAVDQLAEAAKLAEAGDVFGAREILARLNYLLPPGAATATPLLRSAFYFKEALRAALSTTASATAAAAAAPVDVLLKLGAYKDFSELCPVLQFAHFTCVQAMLDELGGAACIHVLDLDIGVGEQWASLMQELASRRPGAALKVTALVSAASHHPLELQLVHENLSNFAAETRVPFQLAFFNLDAMDPAELLATAAGDAVAVHLPAGSVHAPAVPSVLHLVRRLGAKLVVSVDRSCDRGELPFAAHFQSCVFLLESLDAVGTGPDITAKIERFLIQPRIERCLAERYRAAAAGDKTPPWRAMLVSAGFVPVQASSLAEAQAEALLKKVPVRGFRVEKRAGSLVLHWQRGELLSVSAWRC

SEQ ID NO: 160 - DNA, 2578 bp, Panicum virgatum
  misc_feature: Ceres CLONE ID no.1806177
  misc_feature: Encodes the peptide sequence at SEQ ID NO. 161
acccattcttcccttcacaaaccgcacaagagagagaccaccacgagtccacgacacaagaggaggtagagagagaaagggccggccgtgtagctaactagctgctgcctgctggtagtacgagagcgtactgatgagttcttggactctacaccgaggggacgttgtctgaagcgagaggagaagaaacacccgtaggacaagacgtgtcgggaggaggaggaggaggaggaagagaggcaaggagcagcaccatcgccattccttggtctggttgctgttatgaggtgttggattggatgagaggaatgctctttgctggtagcgcacgagaggggcacgcggggacactgctactgctgcaacagcaacaacaacaggggctcgccgccggcaaggtctccggcgtcggcggcctctgggagcccacctcggtgctcgaccaaaggcacagccccagcccgagcccgcccacctcggcttccacgctgtcgtcgcccctgggcgccgcgaccgccggcgtggcggccctcgccggtgctaacgccaagaacgtctccccgccgccacaggcggcggcatggccggggggagcggccgcggaggaggctgcggtggggggcaaggaggagtggcagctcacgccgcttgacatgggccttggcgccggcgaggggtgggacgccgccggctctgtgctgtccgacggcgcggcgccgccggggcttgcccccgaccacaccttcctaaggtggatcattgggggcgaggacgcgtccgtgggcatgggcgccgtcatggacccgccggtccttgagctcgaccacgccccgtccatgatgtcgccggcgttcgggtccaacatgcctttcgcgccggccatggaggacaccaaggctccgcctttcggccacgcgtccaacctcctcctgcaccaccaccagcaccacccccagccccacgcggcgttcttcggctctcacccatccttcgacgcggcgccgccgacgcctaagcggcaccacccgatggcccccgcgccggcgccaaagctgcagtcgttgcctggccctgccgccccggcgggcaggttcgtgccggccatgaagcccaaggcggaggcagcgaacgatgaggcggccgctgcggtggagcagctcgccgaggcggccaagcttgccgaggccggcgacgccttcggcgcccgcgagatattggcgcggctcaattaccggctccccgccgcccccgcggccgggacgccactgctccgctcagccttctacttcaaggaggctttgcgccttgcgctgtccccaaccggcgaggccccggcaccgccggtgtccacgccgtacgacgtggtcctcaagctcggcgcgtacaaggccttctccgaggtctcccccgtgctccagttcgcgcacctcacctgcgtccaggcggtgctggacgagatcggcggcgccgggcgcatccacgtgctcgacttcgacatcggcatgggggagcagtgggcgtcgctgatgcaggagctcgcgcagcgatgccccgcggcgacgctcaaggtcaccgcattggtgtccccggcgacgcaccacccgctggagctgcagctgatccacgagaacctcgctggcttcgccgccgagctcggcgtcttcctccagctggcggtcttcaacatcgacaccctggaccccgcggagctggtggccattaccagcggcgacgctgtcgccgtccacctccccgtgggctcggcccacgtggccgcaatgccggccgtcctccgcctcgtgaagcggctcggcgccaaggtggtgatctcggtggaccacggcggcgaccgcacggagctccccttcgccgcgcacctgttccaggcgttccagtcgtgcgtgtccctgctcgagtccgtcgacgccgtgcgcccggacgccgacgcggtcgccaagatggagcggttcctggtccagcccggcgtggagcgtcgcgtggtggcgcgccaccgcgcggcggccatggacaagccgccgctgccgtggcggaccgtgctcgcgtcggcggggttcgtgccggtgcaggccagcaccttcgccgagtcgcaggccgaggccctgctcaagcggatggccctgatggggttccgcgtggagaagcgcggcggcgcgctctgcctctactggcagcgcggcgagctggtctccgtgtcggcgtggcggtgctgaccaccggccacgccgccgcaccccgacgcgaatctaccaccacccagcccggttttagctaggactaatgatcctactgcgagcaaacaaaaacgtatttttcaccgtcgtcgttgtaaacttgtaatggttgttcgatctgatcgcctgcttatttagtgtcctaaaatttggagtgcgtcgtctgtcgcctggctttgcagccggtctgctcgcgtcgatcagcagagtagattgtgtttggaatagcaggttgtaaaaggtaggtgcggtgcggtaaccagtgcattctaccacccgtgttgttattgctgtgaaatcaatcaatggttatggcgttttaagcc

SEQ ID NO: 161 - protein, 643 aa, Panicum virgatum
  misc_feature: Ceres CLONE ID no.1806177
  misc_feature: Bit score of 1379.0 for HMM based on sequences of FIGURE 6.
  misc_feature (257)..(553): Pfam Name: GRAS Pfam Description: GRAS family transcription factor
  misc_feature: Functional Homolog Of Ceres LOCUS ID no. At4g00150 at SEQ ID NO. 149
MRGMLFAGSAREGHAGTLLLLQQQQQQGLAAGKVSGVGGLWEPTSVLDQRHSPSPSPPTSASTLSSPLGAATAGVAALAGANAKNVSPPPQAAAWPGGAAAEEAAVGGKEEWQLTPLDMGLGAGEGWDAAGSVLSDGAAPPGLAPDHTFLRWIIGGEDASVGMGAVMDPPVLELDHAPSMMSPAFGSNMPFAPAMEDTKAPPFGHASNLLLHHHQHHPQPHAAFFGSHPSFDAAPPTPKRHHPMAPAPAPKLQSLPGPAAPAGRFVPAMKPKAEAANDEAAAAVEQLAEAAKLAEAGDAFGAREILARLNYRLPAAPAAGTPLLRSAFYFKEALRLALSPTGEAPAPPVSTPYDVVLKLGAYKAFSEVSPVLQFAHLTCVQAVLDEIGGAGRIHVLDFDIGMGEQWASLMQELAQRCPAATLKVTALVSPATHHPLELQLIHENLAGFAAELGVFLQLAVFNIDTLDPAELVAITSGDAVAVHLPVGSAHVAAMPAVLRLVKRLGAKVVISVDHGGDRTELPFAAHLFQAFQSCVSLLESVDAVRPDADAVAKMERFLVQPGVERRVVARHRAAAMDKPPLPWRTVLASAGFVPVQASTFAESQAEALLKRMALMGFRVEKRGGALCLYWQRGELVSVSAWRC

SEQ ID NO: 162 - protein, 530 aa, Oryza sativa subsp. indica
  misc_feature: Public GI ID no.125542051
  misc_feature: Bit score of 535.3 for HMM based on sequences of FIGURE 6.
  misc_feature (136)..(441): Pfam Name: GRAS Pfam Description: GRAS family transcription factor
  misc_feature: Functional Homolog Of Ceres LOCUS ID no. At4g00150 at SEQ ID NO. 149
MWGWGREHCSLPALEREKREGEIELVDVWGRARGWLGEGQLGKGSPRSVVGGVIVEWELAASSSSFTLTSPGLRPPTHAASTPPPPPWLDDADHHHDNAFLHWVINDHHHPLLDLDDVDLDYAKPAPFFFADRGLHHHHPASSSFPNPKPTADDNTSTVEQLVQAAKLTEAGDVLAARHILARPAINYRLPASAAPPLLRSALYFKDALRRALISDDDDSSSSTPPPPLHEPHPHDLLLKLTAYKSFSDLSPLLHFAHFTCVQAVLDELSPSASCIHLLDFDIGVGEQWASLMHDLAHRHPGVALKVTALNVTASSSSHHPLQLQLIHDTLSTFAADLSVPFRFAAFNLDATDLTPLLAVAAATDAIAVHLPVGSVHATAVPSVLHLVRRLGAKLVVSVDRGCDRGELPFAAHLLQALRSTVSLLESLDAMGTDSDVAAKIERFWVQPKIQECVRAAVGVGGDKTAASAWRATLASAGFVPVQVSSMAEAQAESLLKKLPVRGFRLERRAGSLFLHWQRGELASVSAWRC

SEQ ID NO: 163 - protein, 479 aa, Oryza sativa subsp. indica
  misc_feature: Public GI ID no.125553722
  misc_feature: Bit score of 909.9 for HMM based on sequences of FIGURE 6.
  misc_feature (127)..(397): Pfam Name: GRAS Pfam Description: GRAS family transcription factor
  misc_feature: Functional Homolog Of Ceres LOCUS ID no. At4g00150 at SEQ ID NO. 149
MSSSSCHPHNPTTLPLPEPDSSKSPEPTSVLYNRSSPSTSLGSCSSKPPEDPPPPPIAADDDCDWDAVVDMHMHMLAPAPAPDSSFLRWIMDTGYADADTFPDHPSFDSDLLQLPMPMPSDHPPQPLVDDLLDAARLLDAGDSTSAREILARLNHRLPSLPSPPGHAHPPLLRAAALLRDALLPPTALPVSSTPLDVPLKLAAHKALADASPTVQFTTFTSTQAFLDALGSARRLHLLDFDVGFGAHWPPLMQELAHHWRRAAGPPPNLKVTALVSPGSSHPLELHLTNESLTRFAAELGIPFEFTALVFDPLSSASPPLGLSAAPDEAVAVHLTAGSGAFSPAPAHLRVVKELRPAVVVCVDHGCERGALNLLRSCAALLESLDAAGASPDVVSKVEQFVLRPRVERLAVGVGGGPPLQSMLASAGFAALQVSNAAEAQAECLLRRTASHGFHVEKRPAALALWWQRSELVSVSAWRC

SEQ ID NO: 164 - protein, 711 aa, Oryza sativa subsp. japonica
  misc_feature: Public GI ID no.115459828
  misc_feature: Bit score of 1562.3 for HMM based on sequences of FIGURE 6.
  misc_feature (326)..(626): Pfam Name: GRAS Pfam Description: GRAS family transcription factor
  misc_feature: Functional Homolog Of Ceres LOCUS ID no. At4g00150 at SEQ ID NO. 149
MRAAPFSADGNGAAELAGSIAALLWPEDKGGGGGGGGGSLLVEPRSVLDCRGSPSPPNSTSTLSSSHGSGAADSISTGVAAVSESSAAAAEATRWAAPGEHGGGGGGELPPIPGALDVGFVAEESWDAMLGDAAAAAGQEQTFLNWIMAAPGDMEPQAPGLSQQQLLANAAGFGFPLQHHPGGVSSPAALASDLSSSGGRSLTSSSGSNSKATSAFGLLSPEAALQPPPATTAPFHNGADMKPPLLGLPSPTLLLNQHQPTPASTLFMPFPSFSDHQQQPLLQPPPKRHHSVPDNLFLLHNQPQPPPPAPAQCLPFPTLHSAVPFQLQPSMQHPRNAMKSTAAAAAAQQQHLLDELAAAAKATEVGNSIGAREILARLNQQLPPIGKPFLRSASYLKDALLLALADGHHAATRLTSPLDVALKLTAYKSFSDLSPVLQFANFTVTQALLDEIASTTASCIRVIDFDLGVGGQWASFLQELAHRCGSGGVSLPMLKLTAFVSAASHHPLELHLTQDNLSQFAADLGIPFEFNAINLDAFDPMELIAPTADEVVAVSLPVGCSARTPLPAMLQLVKQLAPKIVVAIDYGSDRSDLPFSQHFLNCLQSCLCLLESLDAAGTDADAVSKIERFLIQPRVEDAVLGRRRADKAIAWRTVLTSAGFAPQPLSNLAEAQADCLLKRVQVRGFHVEKRGAGLALYWQRGELVSVSAWRC

SEQ ID NO: 165 - protein, 558 aa, Oryza sativa subsp. japonica
  misc_feature: Public GI ID no.125591237
  misc_feature: Bit score of 1147.0 for HMM based on sequences of FIGURE 6.
  misc_feature (173)..(473): Pfam Name: GRAS Pfam Description: GRAS family transcription factor
  misc_feature: Functional Homolog Of Ceres LOCUS ID no. At4g00150 at SEQ ID NO. 149
MEPQAPGLSQQQLLANAAGFGFPLQHHPGGVSSPAALASDLSSSGGRSLTSSSGSNSKATSAFGLLSPEAALQPPPATTAPFHNGADMKPPLLGLPSPTLLLNQHQPTPASTLFMPFPSFSDHQQQPLLQPPPKRHHSVPDNLFLLHNQPQPPPPAPAQCLPFPTLHSAVPFQLQPSMQHPRNAMKSTAAAAAAQQQHLLDELAAAAKATEVGNSIGAREILARLNQQLPPIGKPFLRSASYLKDALLLALADGHHAATRLTSPLDVALKLTAYKSFSDLSPVLQFANFTVTQALLDEIASTTASCIRVIDFDLGVGGQWASFLQELAHRCGSGGVSLPMLKLTAFVSAASHHPLELHLTQDNLSQFAADLGIPFEFNAINLDAFDPMELIAPTADEVVAVSLPVGCSARTPLPAMLQLVKQLAPKIVVAIDYGSDRSDLPFSQHFLNCLQSCLCLLESLDAAGTDADAVSKIERFLIQPRVEDAVLGRRRADKAIAWRTVLTSAGFAPQPLSNLAEAQADCLLKRVQVRGFHVEKRGAGLALYWQRGELVSVSAWRC

SEQ ID NO: 166 - DNA, 2148 bp, Sorghum bicolor
  misc_feature: Ceres ANNOT ID no.6017571
  misc_feature: Encodes the peptide sequence at SEQ ID NO. 167
atgagggcggcgctgttcggtgcccagcggagcggggctgcggacctcgtcggaggcgggaggacgctgctctggccggaggaggggaaggcgaaggcgcagctggagccgagatccgtgccggactgcacgcggagccccagccccagcaactcaacatcgacgctgtcgtcgtacatgggcggtggcggcgctgcggactcgaccggcggcgtggcggtggtttcgggcagcagcgctgccgccgccgccgacgccgccaaatggggagcctccggcaagcacggcggcggcgggaaggaggactgggcaggcggctgtgcgctgccgccgattcctaccggcctcgacatgggggtcatcggcggcggcgacagctgggacgccatgctcggcagcgcggctgcggcgggacaggaccagacgttcttgaactggatcattggagccgccggcgacctggatcagtcagggccgccgctccccgtgcaccagcagccgctccttgacaatgtgggcttcgggttcccggcggcggaccccctgggtttctcgctcgatccccacctcggcggcgttgcctcggacatgtcgtcccctggtgcggtgtcgcacgctcccaacagcggcggcggtggtggcaacaaggcgtcctcggccttcggcctcttctcaccggagtctgcttcgctccagccgccgccgccgccggtgctgttccacgaaggtatcgacacaaagccccctcttcttggtgcgcagccgcccggccgcctccaccagtaccagcaccagccgacctccgccacaaccttcttcatgcccatcccctccttccccaatcacaatcagcagtcgccactcgtccaaccaccgcccaaacgtcatcaatccataggggatgacctctatctcgcccgaaatcggcttctgcctccgccggcggggcaaggtcacgcctttccaccactaaatggtcctgctctgttccagctccagccttcgccaccaccgccccacggggcgatgaagacgacggctgctgaggcggcgcagcagcagttgctggacgagcttgcggtggcggcaaaggccgccgaagccggcaattccattggcgcgcgagagatattggcgcggctcaatcaccagcttcccccgctcgggaagccgttcctccgctccgcctcctacctcaaggaggccctcctcctcgcgctcgccgaaggccaccatggcggctgccacctcacatcaccgctcgacgttgccctcaagctcgcggcgtacaagactttctctgatcactcgcccgtgctccagttcaccaacttcaccgcaacgcaggcacttctggacgaaattgccggcaacacatcatcctgcatccatgtcatcgattttgatcttgctgttggaggccagtgggcttctttcttgcaggagcttgcacaccgccgtggcgcaggtggtgcagctctgccgttcgtcaagctcactgcctttgtatcagctgcttcccaccatccactggaactgcgtcttgcgcgtgacaacattgcacagtttgctgcagaccttggaattccctttgagttcagtgctatcagtgctgatactatcaaccctacagagctcatttctgccactggtgatgaagttgtagctgttgtcctcccggctggttgctctgctcgtgcaccaccactgccagcgatccttcggttggtgaaacagctggctcctaagattgtgatagccatagaccatggcgctgatcgtgctgatcttcccttctcacagcacttcttgaattgctttcagtcttgcatgttcctccttgattcgcttgatgctgctggcattgatgctgattctgccggcaagattgagaagttccttattcagccaagaattgaggattcagtgcttgggcgggccaaggtggacaagccaattgcatggagaagtgcattcgcagctgctgggttcgcgcctattccgcccagcagtttggctgaggcgcaggctgactgcctcctgaagcgggtgcaggtccgcggtttccacgtggagaaatgtggggtcgggctcacactatactggcagcgaggcgagcttgtcactgtatcagcatggcggtgctga

SEQ ID NO: 167 - protein, 715 aa, Sorghum bicolor
  misc_feature: Ceres ANNOT ID no.6017571
  misc_feature: Bit score of 1550.4 for HMM based on sequences of FIGURE 6.
  misc_feature (333)..(630): Pfam Name: GRAS Pfam Description: GRAS family transcription factor
  misc_feature: Functional Homolog Of Ceres LOCUS ID no. At4g00150 at SEQ ID NO. 149
MRAALFGAQRSGAADLVGGGRTLLWPEEGKAKAQLEPRSVPDCTRSPSPSNSTSTLSSYMGGGGAADSTGGVAVVSGSSAAAAADAAKWGASGKHGGGGKEDWAGGCALPPIPTGLDMGVIGGGDSWDAMLGSAAAAGQDQTFLNWIIGAAGDLDQSGPPLPVHQQPLLDNVGFGFPAADPLGFSLDPHLGGVASDMSSPGAVSHAPNSGGGGGNKASSAFGLFSPESASLQPPPPPVLFHEGIDTKPPLLGAQPPGRLHQYQHQPTSATTFFMPIPSFPNHNQQSPLVQPPPKRHQSIGDDLYLARNRLLPPPAGQGHAFPPLNGPALFQLQPSPPPPHGAMKTTAAEAAQQQLLDELAVAAKAAEAGNSIGAREILARLNHQLPPLGKPFLRSASYLKEALLLALAEGHHGGCHLTSPLDVALKLAAYKTFSDHSPVLQFTNFTATQALLDEIAGNTSSCIHVIDFDLAVGGQWASFLQELAHRRGAGGAALPFVKLTAFVSAASHHPLELRLARDNIAQFAADLGIPFEFSAISADTINPTELISATGDEVVAVVLPAGCSARAPPLPAILRLVKQLAPKIVIAIDHGADRADLPFSQHFLNCFQSCMFLLDSLDAAGIDADSAGKIEKFLIQPRIEDSVLGRAKVDKPIAWRSAFAAAGFAPIPPSSLAEAQADCLLKRVQVRGFHVEKCGVGLTLYWQRGELVTVSAWRC

SEQ ID NO: 168 - DNA, 2163 bp, Sorghum bicolor
  misc_feature: Ceres ANNOT ID no.6026716
  misc_feature: Encodes the peptide sequence at SEQ ID NO. 169
atgagggcggcgcccttcagtgccgacgggagcggggcggggaccatagaggcgctgctttggccggacgggaagggcggcggcggcggaggggacctgctggtggagccgacgtcggtgctggactgcagacggagcccgagcccgccgtactcgacatcgacgctgtcttcgtccctgggcggcgccgcgggggactcctcttccggcgtggcggcggtttcggacaacagcgccgccgccgccgccgaagccaccaaatgggcggcgccaggcgagcacggcggcggcggcggtggaggcggaggcgggggcgggaggaaggaggagtggtccggcggtgagctgccgcccataccggggaccctggacgtcgggttcgtcggggaggagggctgggacgccatgctcggcgacgccacggcggtggccggtcaggaccagacgttcctcaactggatcatgaccgcgccgggcgacatggagccgccagcgccgccgctcctcggcaatgccgccggctttgggttcccgacctcggacccgctcgggttctccctgcagcatcacccaggcggcggcggcggcgcctcggccggggcgctggcctccgacctgtcgtcccccggcgcgaggtcgctcaccagcagcagcggcagcagcagcaaggccacttccactttcggcctcctaccaaccgaggccgtgcttcagccgccgccgccggcggccacgaccatgcctttccacgacggtggcgacataaagcccccgcttcttggagtcccgtcggcaaatctactcctcaatcaacaccagacgttgccggcggcctccttcttcatgccgctcccctccttccccgaccatcagcaccagccacatctcccgcccccgccgaagcgccaccactctatgcccgacaacctgttcctcctccaaaaccagctccaaccgccgccgcagggtctaccgttcccaccagtgcataacaccgggcccttccagctccagccatcgctgcaaccgccgcgaggagcgttgaaaacaaccccggcggcgcagcaacatcaacagcttctggacgagcttgctgcggcggcaaaggcggctgaggtcggcaactccatcggcgcgctcgagatattggcgcggctcaatcagcagcttcccccagtcgggaagcctttcctccgctccgcttcctacctcaaggaggccctcctcctcgcgctctcggacggccaccagggctccacccgcctaacctctccgatcgacgtcgtcctcaagctcggtgcatacaagtctttctccgacctctcgcctgtgctccagttcgccaatttcacggccactcaggcgcttctcgacgagatcgcctcaaccacttcatcgtgtatccgcatcattgatttcgaccttggtgttggcggccagtgggcttcctttctgcaggagcttgcacaccgccgtggaactgggaatgtcaccctgccaatgttgaagctcacggccttcgtctcaagtgcttcccaccacccgcttgagctgcatcttactcgggagaacctctcacaatttgctgcggaccttggcattccatttgagttcactgccatcaatctcgatgcatttgatccagcggaactcattcctcctactgccgatgaggttgtcgctgtttgcctccctgttggttgctctgcacgcatgccaccgcttccaatgttgcttcagttagtgaaacaacttgctcctaagattgctgtggctattgaccatggcagtgaccggggtgacctcccattttcacagcacttcatgaattgcttccagtcttgtatgttccttctcgactcacttgatgctgctggcactaatgcggatgctgccagtaagattgagaggtttctgatccaatcgagagtagaggatgcagtacttggccggcgtaaagctgaaaaggcaatggcttggcgggcagtgtttacatcagccgggtttgctccagtgccgctcagcaaccttgcagaagcacaagctgactgcctcttgaagcgggtgcaggtccgtggattccatgtggagaagtgtggaatgggtctagcactctactggcagcgcggtgagctcgtgtctgtctcggcatggcggtgctga

SEQ ID NO: 169 - protein, 720 aa, Sorghum bicolor
  misc_feature: Ceres ANNOT ID no.6026716
  misc_feature: Bit score of 1328.0 for HMM based on sequences of FIGURE 6.
  misc_feature (339)..(635): Pfam Name: GRAS Pfam Description: GRAS family transcription factor
  misc_feature: Functional Homolog Of Ceres LOCUS ID no. At4g00150 at SEQ ID NO. 149
MRAAPFSADGSGAGTIEALLWPDGKGGGGGGDLLVEPTSVLDCRRSPSPPYSTSTLSSSLGGAAGDSSSGVAAVSDNSAAAAAEATKWAAPGEHGGGGGGGGGGGGRKEEWSGGELPPIPGTLDVGFVGEEGWDAMLGDATAVAGQDQTFLNWIMTAPGDMEPPAPPLLGNAAGFGFPTSDPLGFSLQHHPGGGGGASAGALASDLSSPGARSLTSSSGSSSKATSTFGLLPTEAVLQPPPPAATTMPFHDGGDIKPPLLGVPSANLLLNQHQTLPAASFFMPLPSFPDHQHQPHLPPPPKRHHSMPDNLFLLQNQLQPPPQGLPFPPVHNTGPFQLQPSLQPPRGALKTTPAAQQHQQLLDELAAAAKAAEVGNSIGALEILARLNQQLPPVGKPFLRSASYLKEALLLALSDGHQGSTRLTSPIDVVLKLGAYKSFSDLSPVLQFANFTATQALLDEIASTTSSCIRIIDFDLGVGGQWASFLQELAHRRGTGNVTLPMLKLTAFVSSASHHPLELHLTRENLSQFAADLGIPFEFTAINLDAFDPAELIPPTADEVVAVCLPVGCSARMPPLPMLLQLVKQLAPKIAVAIDHGSDRGDLPFSQHFMNCFQSCMFLLDSLDAAGTNADAASKIERFLIQSRVEDAVLGRRKAEKAMAWRAVFTSAGFAPVPLSNLAEAQADCLLKRVQVRGFHVEKCGMGLALYWQRGELVSVSAWRC

SEQ ID NO: 170 - DNA, 1499 bp, Arabidopsis thaliana
  misc_feature: Ceres SEEDLINE ID no.ME01395
  misc_feature: Expected Sequence
  misc_feature: Encodes the peptide sequence at SEQ ID NO. 172
atcaatggaggtttttgattcgccccaagctctcgcgattcctgatgttcttcagtaatttcttgcaatccttataaacaaagagcgtggagaatcgtttcagaggaaagaaaactaaaaatggcgactcttttcaacaaatttcagcaggctgttggagttcttgccaagagtaccacatttgctaagaacccaaggcaactgcagtttgaagcagacgttaacaaactctttatgtatacaagctataaccggttgggacgagaagctgaggagactgatgcagaggagatcattgagatggctggtaaagccactttatctgagcagcagaagcaagttcaagagaacattcactaccaagttgaaaaattctgctctttgatggatggaatccttcttcctgatgttaggaggaacgagtcggggtcacaatcaacaagccctcgtcctcctcgtagaagtggtcttactttcgccattggtagtaataatgcttttccacatgcagatcagccccttgttcccgagacaaagcctttgaaactcgctgacgtctcacagagattaatggatcaaatgggctacaccctcgagatcaaaccgtctgtaatacctcacaaagacgctggtcaaggttgttttatcaaaggcgaagcagatgttggaactgtcttagccttttaccctggagttatttattctcctgctttctacaggtacattcccgggtacccgaaggttgattcacagaactcgtatctcatcaccaggtatgatgggactgtgataaatgctcaaccttggggtcttgggggagaatcaagggaagcctggaacgggtcctacactcctgcggtcaaaacaaacactaaaaccgcagaaaacggttcagacaggttatggaaagcgttgagcaagcctctcgaaggttcgggtaaaggaaaagaggttcttgagaggagaaatccgttggcttttggtcacttagctaaccacccggcgaaagaaatgactccaaacgttatgatatgtccttatgacttccccttgatggcgaaagatctgcggccttacattccgaatatatcttttggggattctggagaaataaagatgaagagatttggaagcttctggttcaagacagggagtaaagacgggttagaagccccggttctgaagacactggtgttagtggcaacgaggtcgttgtgtaatgaggaactattactgaattacaggctgagcaactctaagagacgaccagattggtatactccggttaacgaagaggaagatcggagaagatggagctaaagttctcttttatgttttaatgaaacttgaaaggctctgtttcaaaacatgctcctcggttttctttggactattagtgcgacgtcgttttctgagtgtttcactattttggtttttcgattatttttggaagacattttattctaatcttttaaagacatttatgttgttcggttgtc

SEQ ID NO: 171 - DNA, 1514 bp, Arabidopsis thaliana
  misc_feature: Ceres SEEDLINE ID no.ME01395
  misc_feature: Inplanta Sequence
  misc_feature: Encodes the peptide sequence at SEQ ID NO. 172
atcaatggaggtttttgattcgccccaagctctcgcgattcctgatgttctccagtaatttcttgcaatccttataaacaaagagcgtggagaatcgtttcagaggaaagaaaactaaaaatggcgactcttttcaacaaatttcagcaggctgttggagttcttgccaagagtaccacatttgctaagaacccaaggcaactgcagtttgaagcagacgttaacaaactctttatgtatacaagctataaccggttgggacgagaagctgaggagactgatgcagaggagatcattgagatggctggtaaagccactttatctgagcagcagaagcaagttcaagagaacattcactaccaagttgaaaaattctgctctttgatggatggaatccttcttcctgatgttaggaggaacgagtcggggtcacaatcaacaagccctcgtcctcctcgtagaggtggtcttactttcgccattggtagtaataatgcttttccacatgcagatcagccccttgttcccgagacaaagcctttgaaactcgctgacgtctcacagagattaatggatcaaatgggctacaccctcgagatcaaaccgtctgtaatacctcacaaagacgctggtcaaggttgttttatcaaaggcgaagcagatgttggaactgtcttagccttttaccctggagttatttattctcctgctttctacaggtacattcccgggtacccgaaggttgattcacagaactcgtatctcatcaccaggtatgatgggactgtgataaatgctcaaccttggggtcttgggggagaatcaagggaggcctggaacgggtcctacactcctgcggtcaaaacaaacactaaaaccgcagaaaacggttcagacaggttatggaaagcgttgagcaagcctctcgaaggttcgggtaaaggaaaagaggttcttgagaggagaaatccgttggcttttggtcacttagctaaccacccggcgaaagaaatgactccaaacgttatgatatgtccttatgacttccccttgatggcgaaagatctgcggccttacattccgaatatatcttttggggattctggagaaataaagatgaagagatttggaagcttctggttcaagacagggagtaaagacgggttagaagccccggttctgaagacactggtgttagtggcaacgaggtcgttgtgtaatgaggaactattactgaattacaggctgagcaactctaagagacgaccagattggtatactccggttaacgaagaggaagatcggagaagatggagctaaagttctcttttatgttttaatgaaacttgaaaggctctgtttcaaaacatgctcctcggttttctttggactattagtgcgacgtcgttttctgagtgtttcactattttggtttttcgattatttttggaagacattttattctaatcttttaaagacatttatgttgttcggttgtcaaaaaaaaaaaaaaa

SEQ ID NO: 172 - protein, 399 aa, Arabidopsis thaliana
  misc_feature: Ceres SEEDLINE ID no.ME01395
  misc_feature: Bit score of 991.7 for HMM based on sequences of FIGURE 8.
MATLFNKFQQAVGVLAKSTTFAKNPRQLQFEADVNKLFMYTSYNRLGREAEETDAEEIIEMAGKATLSEQQKQVQENIHYQVEKFCSLMDGILLPDVRRNESGSQSTSPRPPRRGGLTFAIGSNNAFPHADQPLVPETKPLKLADVSQRLMDQMGYTLEIKPSVIPHKDAGQGCFIKGEADVGTVLAFYPGVIYSPAFYRYIPGYPKVDSQNSYLITRYDGTVINAQPWGLGGESREAWNGSYTPAVKTNTKTAENGSDRLWKALSKPLEGSGKGKEVLERRNPLAFGHLANHPAKEMTPNVMICPYDFPLMAKDLRPYIPNISFGDSGEIKMKRFGSFWFKTGSKDGLEAPVLKTLVLVATRSLCNEELLLNYRLSNSKRRPDWYTPVNEEEDRRRWS

SEQ ID NO: 173 - DNA, 1499 bp, Arabidopsis thaliana; identical to SEQ ID NO: 170
  misc_feature: Ceres CLONE ID no.151087
  misc_feature: Encodes the peptide sequence at SEQ ID NO. 174

SEQ ID NO: 174 - protein, 399 aa, Arabidopsis thaliana
  misc_feature: Ceres CLONE ID no.151087
  misc_feature: Bit score of 993.0 for HMM based on sequences of FIGURE 8.
  misc_feature: Functional Homolog Of Ceres SEEDLINE ID no. ME01395 at SEQ ID NO. 172
MATLFNKFQQAVGVLAKSTTFAKNPRQLQFEADVNKLFMYTSYNRLGREAEETDAEEIIEMAGKATLSEQQKQVQENIHYQVEKFCSLMDGILLPDVRRNESGSQSTSPRPPRRSGLTFAIGSNNAFPHADQPLVPETKPLKLADVSQRLMDQMGYTLEIKPSVIPHKDAGQGCFIKGEADVGTVLAFYPGVIYSPAFYRYIPGYPKVDSQNSYLITRYDGTVINAQPWGLGGESREAWNGSYTPAVKTNTKTAENGSDRLWKALSKPLEGSGKGKEVLERRNPLAFGHLANHPAKEMTPNVMICPYDFPLMAKDLRPYIPNISFGDSGEIKMKRFGSFWFKTGSKDGLEAPVLKTLVLVATRSLCNEELLLNYRLSNSKRRPDWYTPVNEEEDRRRWS

SEQ ID NO: 175 - protein, 399 aa, Arabidopsis thaliana
  misc_feature: Public GI ID no.10177809
  misc_feature: Bit score of 980.3 for HMM based on sequences of FIGURE 8.
  misc_feature: Functional Homolog Of Ceres SEEDLINE ID no. ME01395 at SEQ ID NO. 172
MATLFNKFQQAVGVLAKSTTFAKNPRQLQFEADVNKLFMYTSYNRLGREAEETDAEEIIEMAGKATLSEQQKQVQENIHYQVEKFCSLMDGILLPDVRRNESGSQSTSPRPPRRSGLTFAIGSNNAFPHADQPLVPETKPLKLNDVSQRLMDQMGYTLETKPSVIPHKDAGQGCFIKGEADVGTVLAFYPGVIYSPAFYKYIPGYPKVDSQNSYLITRYDGTVINAQPWGLGGESREAWNGSYTPAVKANTKTAENGSDRLWKALSKPLEGSGKGKEVLERRNPLAFGHLANHPAKEMTPNVMICPYDFPLMAKDLRPYIPNISFGDSGEIKMKRFGSFWFKTGSKNGLEAPVLKTLVLVATRSLCNEELLLNYRLSNSKRRPDWYTPVNEEEDRRRWS

SEQ ID NO: 176 - DNA, 1000 bp, Arabidopsis thaliana
  misc_feature (1)..(1000): Ceres Promoter PT0758
agctagccacatcagtgaccaaaaaagataattaacaaaccaaataaaataacaaattttgatcatttggaataaaatttataaaaggaacgaaagcgccttctcacgggtcccatccattgaaatatattctctctttttgctctatataataataacgcgtactaatttgtagtatatattattacaaagtcgatatttgattgttttgtgaacgttgatatattaattttcttggatgatgacaaaaaaagtcatagaaagtaacgtgtgaacatagcattaacaaaatacaaacataatatataaccaaatatatgaaaataggataaaatctcattgaatagatcttcttctattcaaatatataaatatttgtttgtctataaaattaacagagcattcacattatctaaaataatagtaaaatcaaaataaaactaaataaaaataactctggttttataacgattgattttaaatattagtttttgttgtaaagagatcattatatatgtctgtaatatttttatactgagttacatgatatttagttattatagcgtaattaactaagataagaaattaactaaagtgatattctgattattattatttttgttaggacacgtacgtggaaaaactaaacactataggttacaaaacggtataataaactcaccattactggaaaatgtttgcatttgactcaataagtaacttattataagttactgatataatgcatagttttgaaattcttaaataaattattttggtttcgcatgaaaatatgaaaggagagaaatttattattgtcacttatatatatatacatcgtaatcattttttcgtgaataattctctctcccattccattatttctcagtatctctctttctttcccttactttattgttgcttttaaaccttcaatttgctcataaaccaaatatataatatcaaaacaaacaaacaaaaaatcagaattcccctaata

SEQ ID NO: 177 - DNA, 1224 bp, Populus balsamifera subsp. trichocarpa
  misc_feature: Ceres ANNOT ID no.1504145
  misc_feature: Encodes the peptide sequence at SEQ ID NO. 178
atggcttctctttttaacaaatttcaagagtttgtgaaaactctagccaaaagtcccacatttgctagaaatccaagggagtttcaatttgaaacggacatgaatcgtctctttctttttaccagctacaatcgtttggggaaaaatgctgaggaggcagacgcggaggagatcattgaaatggccagtaaagcttctgttgctgatcagcagaaacaggttcaagaaaatatccactttcaaattacaaacttctgctcagctatgaatgaaattcttcttcccgatttggaaaaaagaagcaagaaggatgaagctcctgcacaatcaaatgctgctcctcggcgtagtggccttagttttgctgttggcaagagtggtccacctattgaccgtcctggtgagtttataacagctatacctgagacgaagcagttaagtcgtagcaaagtatcacagagtttaagggatgaaattggttacacacttgatctcaagccatctctgataccccacaaggaagctggagaaggtttgtttttaagtggtgaggctgatgtgggcactgtgattgccatataccctggtgtcatatacagccctgcttattaccggtatatcccagggtacccaagagttgatgcccagaacccatatttgatcactagatatgatgggactgtgatcaatgccctgccttggggttctgggggtgaaagtcgcgaagtgtgggatggcttaactgtgccagaaatcaggtctaatgtgcaaagtgttgagaaaggtcaagaccgggtctggagaatgctgagtaaacctttggaaggtacacgagttggttctattggtgatgtcttggagcggagaaacccattagcattggctcattttgctaaccacccagcgaagggtatggatccaaatgttatgatttgcccctatgacttcccactgactgagaaggatatgaggacctttataccaaacgtatcttttggaaatcatgaagaagtgaatatgagaagatttggcagtttttggttcaaatctagtgccaaaaatagcgtatctgatgttcctgttctcaagactctggttttagttgccactagggcgctttgtaatgaagaggtgctcctgaactacaggttgagcaacacaaaacgtcgaccagcatggtatagtccggtggatgaagaggaagaccggaggagatggagctaa

SEQ ID NO: 178 - protein, 407 aa, Populus balsamifera subsp. trichocarpa
  misc_feature: Ceres ANNOT ID no.1504145
  misc_feature: Bit score of 989.9 for HMM based on sequences of FIGURE 8.
  misc_feature: Functional Homolog Of Ceres SEEDLINE ID no. ME01395 at SEQ ID NO. 172
MASLFNKFQEFVKTLAKSPTFARNPREFQFETDMNRLFLFTSYNRLGKNAEEADAEEIIEMASKASVADQQKQVQENIHFQITNFCSAMNEILLPDLEKRSKKDEAPAQSNAAPRRSGLSFAVGKSGPPIDRPGEFITAIPETKQLSRSKVSQSLRDEIGYTLDLKPSLIPHKEAGEGLFLSGEADVGTVIAIYPGVIYSPAYYRYIPGYPRVDAQNPYLITRYDGTVINALPWGSGGESREVWDGLTVPEIRSNVQSVEKGQDRVWRMLSKPLEGTRVGSIGDVLERRNPLALAHFANHPAKGMDPNVMICPYDFPLTEKDMRTFIPNVSFGNHEEVNMRRFGSFWFKSSAKNSVSDVPVLKTLVLVATRALCNEEVLLNYRLSNTKRRPAWYSPVDEEEDRRRWS

SEQ ID NO: 179 - protein, 386 aa, Arabidopsis thaliana
  misc_feature: Public GI ID no.15241572
  misc_feature: Bit score of 721.2 for HMM based on sequences of FIGURE 8.
  misc_feature: Functional Homolog Of Ceres SEEDLINE ID no. ME01395 at SEQ ID NO. 172
MAFAKMMFLFGKFQQGVGVLAKSTTFAKNPRQLQFEADINKLFMFTSYNRLGRDAEEADAEEIIEMAGKATFSEQQKQVQENIHYQLQNFCSSMNEILLTNIDKTKDLNEPGSESRRDNIVPAADKPIVPETKPLKLDEVSHRLKDRVGYTLEIKPSLIPHKDAGQGCFIEGEADVGAVLAFYPGVIYSPAFHRYIPGYPNVDAQNSYLITGYDGTVINAQPWGRGGISREVWNGSFTTPEIRTEATTTENSSDKVWKMLSRPLEGSGGVEAVIEMRNPLAFGHFINHPGKEMESNVMICPYDFLLSETEMRAYIPNVAFGNTGDVKMGRFESFLSRTGSNSSLDAHVLKTIVLVATKALCNEELMLNYRLSNSEKRLEWYIPLDE

SEQ ID NO: 180 - protein, 386 aa, Arabidopsis thaliana
  misc_feature: Public GI ID no.26453064
  misc_feature: Bit score of 718.2 for HMM based on sequences of FIGURE 8.
  misc_feature: Functional Homolog Of Ceres SEEDLINE ID no. ME01395 at SEQ ID NO. 172
MAFAKMMFLFGKFQQGVGVLAKSTTFAKNPRQLQFEADINKLFMFTSYNRLGRDAEEADAEEIIEMAGKATFSEQQKQVQENIHYQLQNFCSSMNEILLTNIDKTKDLNEPGSESRRDNIVPAADKPIVPETKPLKLDEVSHRLKDRVGYTLEIKPSLIPHKDAGQGCFIEGEADVGAVLAFYPGVIYTPAFHRYIPGYPNVDAQNSYLITGYDGTVINAQPWGRGGISREVWNGSFTTPEIRTEATTTENSSDKVWKMLSRPLEGSGGVEAVIEMRNPLAFGHFINHPGKEMESNVMICPYDFLLSETEMRAYIPNVAFGNTGDVKMGRFESFLSRTGSNSSLDAHVLKTIVLVATKALCNEELMLNYRLSNSEKRLEWYIPLDE

SEQ ID NO: 181 - DNA, 1488 bp, Populus balsamifera subsp. trichocarpa
  misc_feature: Ceres ANNOT ID no.1451079
  misc_feature: Encodes the peptide sequence at SEQ ID NO. 182
atggaggagaaggggatgactaatgtcgaacaaacataccaaacaaacaaaagacagaaagaaaggaaagcccaagctgaaaagcctactcattggggttccggttaccaaagaaatttggcccagcatgtatggacacaacttcggcctgagattttttcattcaacaaggcagaaggcaagagtgcgagtgttcctcagttgctgctgcagtttcttcaatggcttctctttttaacaaatttcaagagatattgggtagattcagggtcatgtttattgacaaggatggagtttgtgaaaactctagccaaaagtcccacatttgctagaaatccaagggagtttcaatttgaaacggacatgaatcgtctctttctttttaccagctacaatcgtttggggaaaaatgctgaggaggcagacgcggaggagatcattgaaatggccagtaaagcttctgttgctgatcagcagaaacaggttcaagaaaatatccactttcaaattacaaacttctgctcagctatgaatgaaattcttcttcccgatttggaaaaaagaagcaagaaggatgaagctcctgcacaatcaaatgctgctcctcggcgtagtggccttagttttgctgttggcaagagtggtccacctattgaccgtcctggtgagtttataacagctatacctgagacgaagcagttaagtcgtagcaaagtatcacagagtttaagggatgaaattggttacacacttgatctcaagccatctctgataccccacaaggaagctggagaaggtttgtttttaagtggtgaggctgatgtgggcactgtgattgccatataccctggtgtcatatacagccctgcttattaccggtatatcccagggtacccaagagttgatgcccagaacccatatttgatcactagatatgatgggactgtgatcaatgccctgccttggggttctgggggtgaaagtcgcgaagtgtgggatggcttaactgtgccagaaatcaggtctaatgtgcaaagtgttgagaaaggtcaagaccgggtctggagaatgctgagtaaacctttggaaggtacacgagttggttctattggtgatgtcttggagcggagaaacccattagcattggctcattttgctaaccacccagcgaagggtatggatccaaatgttatgatttgcccctatgacttcccactgactgagaaggatatgaggacctttataccaaacgtatcttttggaaatcatgaagaagtgaatatgagaagatttggcagtttttggttcaaatctagtgccaaaaatagcgtatctgatgttcctgttctcaagactctggttttagttgccactagggcgctttgtaatgaagaggtgctcctgaactacaggttgagcaacacaaaacgtcgaccagcatggtatagtccggtggatgaagaggaagaccggaggagatggagctaa

SEQ ID NO: 182 - protein, 399 aa, Populus balsamifera subsp. trichocarpa
  misc_feature: Ceres ANNOT ID no.1451079
  misc_feature: Bit score of 951.2 for HMM based on sequences of FIGURE 8.
  misc_feature: Functional Homolog Of Ceres SEEDLINE ID no. ME01395 at SEQ ID NO. 172
MEFVKTLAKSPTFARNPREFQFETDMNRLFLFTSYNRLGKNAEEADAEEIIEMASKASVADQQKQVQENIHFQITNFCSAMNEILLPDLEKRSKKDEAPAQSNAAPRRSGLSFAVGKSGPPIDRPGEFITAIPETKQLSRSKVSQSLRDEIGYTLDLKPSLIPHKEAGEGLFLSGEADVGTVIAIYPGVIYSPAYYRYIPGYPRVDAQNPYLITRYDGTVINALPWGSGGESREVWDGLTVPEIRSNVQSVEKGQDRVWRMLSKPLEGTRVGSIGDVLERRNPLALAHFANHPAKGMDPNVMICPYDFPLTEKDMRTFIPNVSFGNHEEVNMRRFGSFWFKSSAKNSVSDVPVLKTLVLVATRALCNEEVLLNYRLSNTKRRPAWYSPVDEEEDRRRWS

SEQ ID NO: 183 - DNA, 1811 bp, Panicum virgatum
  misc_feature: Ceres CLONE ID no.1786527
  misc_feature: Encodes the peptide sequence at SEQ ID NO. 184
accccttctcccgtcttcacccccagctggagcgttccggccgacggcgtcgctcgatctcctagctcccgcggagccagcaaggggccgccggctgccgctctccgccgcgccgcgccagaatggctttcctcttcaacaaattccaggaggcggtcaaaacacttgctaagaaccccatgtttgctcgtgatccaagacatcttcaatttgaagctgatgtgaaccgtctgtttctctatacgagctattatcgtctgggagagaatgctgaagagaaggatgcagaggagattattgatttggctggcaaagcatctgttgccgaacagcagaatcaagtgcaggaaaatgtccactatcaacttacgcatatgtgccgagcaatggatggcattcttcgtcctgatataacaaatgacccgtcaaaagatccttcagaaacacatagctattctcggcgtagtggattgagttttgctgttggcggagctgcatctgcaaacaagcaaagtgcagctatccctgctacacggcctataactcgagcagaactgtcaaataaattcagggatcattttgggtacacccttgacatcagaccatctggaattcctcacaaagatgcaggccaaggtctgttcttatctggagaagcaaatgttggtgctgtccttgccatctatcctggtgttatatattcacctgcttattatcgatatatacctggatacccaagaattgatgcatgcaacaactatctgatcacaagatatgatggaacaataattgatgcaaaaccatggtctttggatggtgaaactagagatttatgggatggttcatatttggtggaccataacgctgtgccacctaaaggctcagataacaactctgatcgagtgtggagaatgcttagcaagcctcttgagaaaaatatgagggaaaattttggtgaagtgcttgaacgaagaaatccccttgcttttggtcattttgcaaatcatccaccaaaaggttcaagtcctaatgtcatgatctgcccatatgattttccgctgtcagagaagaacatgagagtatacatccctaacattacgtttggtggtgaagagcccattaagatgaagaggtttggctccttctatttcaagtctggaagttctgataatcaggctggggattctctagttctaaagacactagtattggtgagtacaagatccattcgcgatgaagagctcttccttaactaccgttacagtaactcaaagcggcgaccagaatggtatagccctgttgatgaagaagaggacaagaggagatggagctagttcagcacttctgtaccattctggctatgcaattgtttgctaacacttctgtttttcctggaaattgcaacagagcactaagctcctgaaatgagatggcagtttccggttcctattgtttggcctggcatttatcagcatgaaaaaagtagtccgcctccttgaaactctactcatgggtcgtttgtagcgcataaagaatactggttacattgttgttactccttttttgtgttccctatcccagtgatttaagggagattttatgaatccacaacaatagttttggcatggcatttatcatcatgagaaaaagtagagtgcctccagtaaactctactcgcgggtactttgtagcatataaagaatactgattacatttgttgttactccttttatgtgttccctacccccctgattgatttaagggagataaataatttatgaatctattgcctgatatcaaagtttactttg

SEQ ID NO: 184 - protein, 403 aa, Panicum virgatum
  misc_feature: Ceres CLONE ID no.1786527
  misc_feature: Bit score of 1021.8 for HMM based on sequences of FIGURE 8.
  misc_feature: Functional Homolog Of Ceres SEEDLINE ID no. ME01395 at SEQ ID NO. 172
MAFLFNKFQEAVKTLAKNPMFARDPRHLQFEADVNRLFLYTSYYRLGENAEEKDAEEIIDLAGKASVAEQQNQVQENVHYQLTHMCRAMDGILRPDITNDPSKDPSETHSYSRRSGLSFAVGGAASANKQSAAIPATRPITRAELSNKFRDHFGYTLDIRPSGIPHKDAGQGLFLSGEANVGAVLAIYPGVIYSPAYYRYIPGYPRIDACNNYLITRYDGTIIDAKPWSLDGETRDLWDGSYLVDHNAVPPKGSDNNSDRVWRMLSKPLEKNMRENFGEVLERRNPLAFGHFANHPPKGSSPNVMICPYDFPLSEKNMRVYIPNITFGGEEPIKMKRFGSFYFKSGSSDNQAGDSLVLKTLVLVSTRSIRDEELFLNYRYSNSKRRPEWYSPVDEEEDKRRWS

SEQ ID NO: 185 - DNA, 1696 bp, Triticum aestivum
  misc_feature: Ceres CLONE ID no.1005083
  misc_feature: Encodes the peptide sequence at SEQ ID NO. 186
ctcactccccttcaccactgctcccgcagccttcgttcggccttgcccctcccgccgaaccaaggagtaccgggcgcggcggcggcggctaccgcccgcagggccagcatggcgtttctcttcaacaaattccaggaggcaatcaaaacacttgctaagagtccaagctttgctcgagacccacggcatcttcagtttgatgctgacgtgaatcgtttatttctctataccagctataatcgtttgggagagcattctgaagaaaaggacgccgaggagattattgacctggctagcaaagcatctgttactgaccagcagaagcaagttcagggaaatgttcattatcaacttaagcatatatgcaaatcaatggataacattcttcgtcctgatacaaaagatccatcacaatcttcttctgatgcttataataattctcgacgaagtggcttgagtttggccgttggcacaggagttgcagctgcaaacaagccagctgttcctgctacgcgacctttaactcaagctgaattgtcaaacaaattcagggatcagtttggctacacccttgacatcaagccgtcactaatacctcacaaagatgcagggcaaggtctgttcttatctggagaagctaatattggtgctgtcctagccatctaccctggagttatatactcacctgcgtattatcgatatatccctggatacccaagaatcgatgcgtgcaacagctatcttatcacaagatatgacggaacaataatcaacgcgaaaccatggcatttaggtggtgaaacaagagaaatatgggatggttcagatccagtggattacaatacaacgccacccaaaagcccagagagcaactctgaccgggcgtggaggatgcttaacaagcccctgcagaagagtggcactgaaaacttcggggatgtgcttgaacggcgaaatccactagcctttggtcatttcgcgaaccacccaccgggagggtcgactcctaatgtcatgatctgcccatatgattttccactgacagagaaggacatgagagtatacatcccgaacattgcatttggtggtgaagagcccgttacaatgaagaggtttggctccttctggttcaagtccagagcccctggtaaagagactggggagtcaccggttctgaggacgctagtaagtacgaggtccgtatgtgacgaagagctctacctgaactaccggtacagctcaaaggggcggccagactggtataccccagtggatgaagaagaggataagaggagatggagctaggtctgaaccgacctgcctgtaatgttttgttccaatgtttctttcatcagtaactggtgaactccagaagccgattcggccattctttctatgtttcagtcaaccgcataggtagtgtctctgctgaactcttctcgcaggtcttttgtggcaataaaaagaacaccagttacgtctcatgttatttgaggtagtatctgtattatccatcccgttgttgtaaggggatatttacgagcttatcactcaatctgtgtcagcagtgccatacttatttgctttcggaatagtaacaagctatgccatattgccagcgaactgcttctcatctaaataaatactacctcagtaacttaatataagacatttttttgacactattacagtgtcc

SEQ ID NO: 186 - protein, 398 aa, Triticum aestivum
  misc_feature: Ceres CLONE ID no.1005083
  misc_feature: Bit score of 1005.5 for HMM based on sequences of FIGURE 8.
  misc_feature: Functional Homolog Of Ceres SEEDLINE ID no. ME01395 at SEQ ID NO. 172
MAFLFNKFQEAIKTLAKSPSFARDPRHLQFDADVNRLFLYTSYNRLGEHSEEKDAEEIIDLASKASVTDQQKQVQGNVHYQLKHICKSMDNILRPDTKDPSQSSSDAYNNSRRSGLSLAVGTGVAAANKPAVPATRPLTQAELSNKFRDQFGYTLDIKPSLIPHKDAGQGLFLSGEANIGAVLAIYPGVIYSPAYYRYIPGYPRIDACNSYLITRYDGTIINAKPWHLGGETREIWDGSDPVDYNTTPPKSPESNSDRAWRMLNKPLQKSGTENFGDVLERRNPLAFGHFANHPPGGSTPNVMICPYDFPLTEKDMRVYIPNIAFGGEEPVTMKRFGSFWFKSRAPGKETGESPVLRTLVSTRSVCDEELYLNYRYSSKGRPDWYTPVDEEEDKRRWS

SEQ ID NO: 187 - protein, 405 aa, Oryza sativa subsp. japonica
  misc_feature: Public GI ID no.115447467
  misc_feature: Bit score of 1015.8 for HMM based on sequences of FIGURE 8.
  misc_feature: Functional Homolog Of Ceres SEEDLINE ID no. ME01395 at SEQ ID NO. 172
MGSLFIRFQEAVKTLAKNPMFANNRLFARDPRHLQFEADVNRLFLYTSYYRLGANAEEKDAEEIIDMASKASVSEQQKQVQENVHYQLTNMCQAMDSILLPDTKNGASEANNYPRRSGLSFAVGTGVASANKPDVPSTRPLNRAELSNKFRDHFQYTLDIRPSQIPHKDAGQGLFLSGETNAGAVLAIYPGVVYSPAYYRYIPGYPKIDACNNYLITRYDGTIIDAKPWQLGGDSREIWDGSDLVDYNAVPSKSQESNSDRAWRMLSKPLKKGHTENFGEVLERRNPLAFGHFANHPPKGSTPNVMICPYDFPLTEKDMRVYIPNITFGGEEEPVTMKRFGSFWFKSGRSGNQEGESPVLKTLVLVSTRSICDEELFLNYRYSNSKKRPEWYIPVDEEEDKRRWS

SEQ ID NO: 188 - protein, 439 aa, Oryza sativa subsp. japonica
  misc_feature: Public GI ID no.125582985
  misc_feature: Bit score of 986.3 for HMM based on sequences of FIGURE 8.
  misc_feature: Functional Homolog Of Ceres SEEDLINE ID no. ME01395 at SEQ ID NO. 172
MGSLFIRFQEVHTLSLFAVYIPPQTITSGSRSAPCASERSAVDPAVKTLAKNPMFANNRLFARDPRHLQFEADVNRLFLYTSYYRLGANAEEKDAEEIIDMASKASVSEQQKQVQENVHYQLTNMCQAMDSILLPDTKNGASEANNYPRRSGLSFAVGTGVASANKPDVPSTRPLNRAELSNKFRDHFQYTLDIRPSQIPHKDAGQGLFLSGETNAGAVLAIYPGVVYSPAYYRYIPGYPKIDACNNYLITRYDGTIIDAKPWQLGGDSREIWDGSDLVDYNAVPSKSQESNSDRAWRMLSKPLKKGHTENFGEVLERRNPLAFGHFANHPPKGSTPNVMICPYDFPLTEKDMRVYIPNITFGGEEEPVTMKRFGSFWFKSGRSGNQEGESPVLKTLVLVSTRSICDEELFLNYRYSNSKKRPEWYIPVDEEEDKRRWS

SEQ ID NO: 189 - protein, 325 aa, Arabidopsis thaliana
  misc_feature: Public GI ID no.8346564
  misc_feature: Bit score of 526.6 for HMM based on sequences of FIGURE 8.
  misc_feature: Functional Homolog Of Ceres SEEDLINE ID no. ME01395 at SEQ ID NO. 172
MAFAKMMFLFGKFQQGVGVLAKSTTFAKNPRQLQFEADINKLFMFTSYNRLGRDAEEADAEEIIEMAGKATFSEQQKQVQENIHYQLQNFCSSMNEILLTNIDKTKDLNEPGSESRRDNIVPAADKPIVPETKPLKLDEVSHRLKDRVGYTLEIKPSLIPHKDAGQGCFIEGEADVGAVLAFYPGVIYSPAFHRYIPGYPNVDAQNSYLITGYDGTVINAQPWGRGGISREVWNGSFTTPEIRTEATTTENSSDKVWKMLSRPLEGSGGVEAVIEMRNPLAFGHFINHPGKEMESNVMICPYDFLLSETEMRAYIPNVAFGNTGD

SEQ ID NO: 190 - DNA, 1597 bp, Glycine max
  misc_feature: Ceres CLONE ID no.667071
  misc_feature: Encodes the peptide sequence at SEQ ID NO. 191
attactttttcgatttgttacacccattacctgctaccacacttctatgccttctcatttttctggtgctgctttgggagaataaggtttccgagcaataaatactggattcatttgatgacttttaaagtcttcaattgtgtgagtttcttttccagtatctaaaatttaatgtgcataaaaatcttgttgaggttgtgaatggtagcttcttcctccccaaatcaccgatggcttttttatttcagaaatttcaagaggctgtgaaaacccttgcaaaaaatcctgcttttgctagggatcctagtcaactacaatttgaagctgacattaaccgcttattcctttatacaagctacaatctgttgggaaagaatgctgatgaagcagatgcggaagagattattgaaattgccaataaagcctcttttgctgatcaacaaatgcaagtaaaagaaaatgttcattctcaaatcaaagcattttgcacgtacatggatgaaatgcttcttccaaatgaaaagagggtgaatgatcccatggaattatctcagcaggaaaacagttcacctcaccatagtgggctaaattctgctaaagttgtctctaaacaaagatcatatacccaagcagaagtttctcagaagttaaaagatcaacttggctacaagcttaatgttaaaccttctcaaatatctcacaaggattctggccaaggtctatttttagatggtgcagctgatgttggtgccgtaattgccttttatcctggtgtggtctattctccagcttattaccaatatattcccggataccttgatgagcagaacccctatttgattacaagatatgacgggactgtcattgatgcccaaccttggggttgtggaggtgaagggccggaacgattcaatggtagaaaaatgttagaaagaaagcttgacaatgaaggagctgagaagggttcagacagaatgagtaaacctttggaaggttcccaggtagaaaatgmcaatgaaaatgatgatgtagtcgagcgcagaaacccgttggccttggcacattttgctaatcaccccgcaaaagggatgcttccaaatgtcatgatttgcccttatgactttccattgactgaaaacaacatgagagtttacatacccaacatattatttggaaacgcagaagtaaacatcaagagacttggcagcttttggttcaaatytggagtttcaagaaatagtcaatcagatgttcttaccctgaaaactgttgttytggtagcaactaggagtcttcaagatgaagaactgctcctgaactacaggctgagcaactytaaraagtggccagaatggtatgctccagtggatgaagaagaggacataatgacaggaaaagatgaaagtagccaatgaccaacagttttytgtacgaaacaccttctcacatggtggcttagtagtggcatttgttccttaatttccctgtttttgcatgaaactgtggtagttgtctcgtcattgttttgataataatctctaaacagtcagaatgagtcgtatctttttgtgatggatgaaatgaaactttttgattt

SEQ ID NO: 191 - protein, 394 aa, Glycine max
  misc_feature: Ceres CLONE ID no.667071
  misc_feature: Bit score of 668.8 for HMM based on sequences of FIGURE 8.
  misc_feature: Functional Homolog Of Ceres SEEDLINE ID no. ME01395 at SEQ ID NO. 172
  misc_feature (261)..(261): Xaa is any aa, unknown, or other
  misc_feature (331)..(331): Xaa is any aa, unknown, or other
  misc_feature (349)..(349): Xaa is any aa, unknown, or other
  misc_feature (369)..(369): Xaa is any aa, unknown, or other
  misc_feature (370)..(370): Xaa is any aa, unknown, or other
MAFLFQKFQEAVKTLAKNPAFARDPSQLQFEADINRLFLYTSYNLLGKNADEADAEEIIEIANKASFADQQMQVKENVHSQIKAFCTYMDEMLLPNEKRVNDPMELSQQENSSPHHSGLNSAKVVSKQRSYTQAEVSQKLKDQLGYKLNVKPSQISHKDSGQGLFLDGAADVGAVIAFYPGVVYSPAYYQYIPGYLDEQNPYLITRYDGTVIDAQPWGCGGEGPERFNGRKMLERKLDNEGAEKGSDRMSKPLEGSQVENXNENDDVVERRNPLALAHFANHPAKGMLPNVMICPYDFPLTENNMRVYIPNILFGNAEVNIKRLGSFWFKXGVSRNSQSDVLTLKTVVXVATRSLQDEELLLNYRLSNXXKWPEWYAPVDEEEDIMTGKDESSQ

SEQ ID NO: 192 - protein, 386 aa, Oryza sativa subsp. indica
  misc_feature: Public GI ID no.125540418
  misc_feature: Bit score of 777.6 for HMM based on sequences of FIGURE 8.
  misc_feature: Functional Homolog Of Ceres SEEDLINE ID no. ME01395 at SEQ ID NO. 172
MGSLFIRFQEVHTLSLFAVYIPPQTITSGSRSAPCASERSAVDPAVKTLAKNPMFANNRLFARDPRHLQFEADVNRLFLYTSYYRLGANAEEKDAEEIIDMASKASVSEQQKQVQENVHYQLTNMCQAMDSILLPDTKNGASEANNYPRRSGLSFAVGTGVASANKPAIYPGVVYSPAYYRYIPGYPKIDACNNYLITRYDGTIIDAKPWQLGGDSREIWDGSDLVDYNAVPSKSQESNSDRAWRMLSKPLKKGHTENFGEVLERRNPLAFGHFANHPPKGSTPNVMICPYDFPLTEKDMRVYIPNITFGGEEEPVTMKRFGSFWFKSGRSGNQVGESPVLKTLVLVSTRSICDEELFLNYRYSNSKKRPEWYIPVDEEEDKRRWS

SEQ ID NO: 193 - DNA, 1425 bp, Populus balsamifera subsp. trichocarpa
  misc_feature: Ceres ANNOT ID no.1451080
  misc_feature: Encodes the peptide sequence at SEQ ID NO. 194
atggctataaggaaatcacctttccaaaacccacataggtttttcaatcaacgaagcacaagacaataccagacagcaagtgttgtgaaaactctagccaaaagtcccacagatggtacaagtacaaaggaccttaaacgtctctttattttaaccagatctgtaattgcttgttcttttgagtatcttgagtttctaatgagaggtaaagttttcagctgcaatcgtttgggaaggaatgctgataaggctgacgcaaaggatatcattgaaatggccaataaattttatgttgctgaacagcagaaacagatccaagaaaacatccattttcaaattaaaaacttctgcacagctatgaatgatattcttcttcctgatgcgagaaagagaagtaggaaggatgaagcacctgcacaatcaaatgctttttctgttggcaagagtggtccacctactgatcgtcatgctatacctgagatgaggcggttgagtcatgctgaagtatcacagagtttaaaggatcacattggttacacacttgatgtgaagccatctctgatgccccatgaaaaagctggacaaggtttgctcataaacggtgaggctgatgctggcgctgttattgccatataccccggcatcatacacagtcctgcttattaccagtacatcccagggtacccaagaattcatgcccggaaccggtacttgatcactagacatgatgggacagttatcaatgcacaaccttggggttttggtggtgaaattcgtgaagtgtgggatggcttcacagtgccagaaatcatgcctaatgtgcaaagtactggtaaagatggtccagagctagtctggagggtgttgagtaagcctttggaaggtactggggttggttctattggtgatgtcttggagaggagaaacccattagctttggctcattttgccaaccaggtagcagtgggcatgcatcaaaatgttatggcttgcccttatgacttcccactgaccgagatggatatgaggacctatataccaaatgtatcgtttgcaaatccagaagtgaatattagaagatatggcagtttttggttcagttccaaaagcagtgaatccaatgttcctgttctcaagactctcgtactagtcgctactagggcactctgtgatgaagaagtgctcgtagactacagagttagagcctctgtggctcttgagcatgtccttgtagtgccccaagtgggagatcgcattccatcttatcatccttccatccataaaacgctagtgagatttcgtagcccttgcaattggaaccacaagctgtgggacattctcatgtcaagctccaataaagaactcatctgttcatgtaaagtcattttaaaagagtcaatgagattgcaaatggagaactactga

SEQ ID NO: 194 - protein, 408 aa, Populus balsamifera subsp. trichocarpa
  misc_feature: Ceres ANNOT ID no.1451080
  misc_feature: Bit score of 522.0 for HMM based on sequences of FIGURE 8.
  misc_feature: Functional Homolog Of Ceres SEEDLINE ID no. ME01395 at SEQ ID NO. 172
MRGKVFSCNRLGRNADKADAKDIIEMANKFYVAEQQKQIQENIHFQIKNFCTAMNDILLPDARKRSRKDEAPAQSNAFSVGKSGPPTDRHAIPEMRRLSHAEVSQSLKDHIGYTLDVKPSLMPHEKAGQGLLINGEADAGAVIAIYPGIIHSPAYYQYIPGYPRIHARNRYLITRHDGTVINAQPWGFGGEIREVWDGFTVPEIMPNVQSTGKDGPELVWRVLSKPLEGTGVGSIGDVLERRNPLALAHFANQVAVGMHQNVMACPYDFPLTEMDMRTYIPNVSFANPEVNIRRYGSFWFSSKSSESNVPVLKTLVLVATRALCDEEVLVDYRVRASVALEHVLVVPQVGDRIPSYHPSIHKTLVRFRSPCNWNHKLWDILMSSSNKELICSCKVILKESMRLQMENY

SEQ ID NO: 195 - DNA, 1143 bp, Populus balsamifera subsp. trichocarpa
  misc_feature: Ceres ANNOT ID no.1504146
  misc_feature: Encodes the peptide sequence at SEQ ID NO. 196
atggctataaggaaatcacctttccaaaacccacataggtttttcaatcaacgaagcacaagacaataccagacagcaagtgttgtgaaaactctagccaaaagtcccacagatggtacaagtacaaaggaccttaaacgtctctttattttaaccagatctgtaattgcttgttcttttgagtatcttgagtttctaatgagaggtaaagttttcagctgcaatcgtttgggaaggaatgctgataaggctgacgcaaaggatatcattgaaatggccaataaattttatgttgctgaacagcagaaacagatccaagaaaacatccattttcaaattaaaaacttctgcacagctatgaatgatattcttcttcctgatgcgagaaagagaactatacctgagatgaggcggttgagtcatgctgaagtatcacagagtttaaaggatcacattggttacacacttgatgtgaagccatctctgatgccccatgaaaaagctggacaaggtttgctcataaacggtgaggctgatgctggcgctgttattgccatataccccggcatcatacacagtcctgcttattaccagtacatcccagggtacccaagaattcatgcccggaaccggtacttgatcactagacatgatgggacagttatcaatgcacaaccttggggttttggtggtgaaattcgtgaagtgtgggatggcttcacagtgccagaaatcatgcctaatgtgcaaagtactggtaaagatggtccagagctagtctggagggtgttgagtaagcctttggaaggtactggggttggttctattggtgatgtcttggagaggagaaacccattagctttggctcattttgccaaccaggtagcagtgggcatgcatcaaaatgttatggcttgcccttatgacttcccactgaccgagatggatatgaggacctatataccaaatgtatcgtttgcaaatccagaagtgaatattagaagatatggcagtttttggttcagttccaaaagcagtgaatccaatgttcctgttctcaagactctcgtactagtcgctactagggcactctgtgatgaagaagtgctcgtagactacaggttgacaaacatgaagtgttag

SEQ ID NO: 196 - protein, 314 aa, Populus balsamifera subsp. trichocarpa
  misc_feature: Ceres ANNOT ID no.1504146
  misc_feature: Bit score of 459.2 for HMM based on sequences of FIGURE 8.
  misc_feature: Functional Homolog Of Ceres SEEDLINE ID no. ME01395 at SEQ ID NO. 172
MRGKVFSCNRLGRNADKADAKDIIEMANKFYVAEQQKQIQENIHFQIKNFCTAMNDILLPDARKRTIPEMRRLSHAEVSQSLKDHIGYTLDVKPSLMPHEKAGQGLLINGEADAGAVIAIYPGIIHSPAYYQYIPGYPRIHARNRYLITRHDGTVINAQPWGFGGEIREVWDGFTVPEIMPNVQSTGKDGPELVWRVLSKPLEGTGVGSIGDVLERRNPLALAHFANQVAVGMHQNVMACPYDFPLTEMDMRTYIPNVSFANPEVNIRRYGSFWFSSKSSESNVPVLKTLVLVATRALCDEEVLVDYRLTNMKC

SEQ ID NO: 197 - DNA, 1212 bp, Sorghum bicolor
  misc_feature: Ceres ANNOT ID no.6113886
  misc_feature: Encodes the peptide sequence at SEQ ID NO. 198
atggcttccctcttcaacaagatccaagaggcgatcagaacaattgctaagagccccatgtttgctcgtgatccaaggcatcttcaatttgaagctgatgtaaatcgtttgtttctctatacgagctattctcgtctgggggagaatgctgaagagaaggacgcagaggagattattgacttggctagcaaagcttctgttgctgatcagcagaaacaagtgcaggaaaatgttcattatcaacttaggcatatgtgccaatcaatggataacattttatgccctgatacaacaaatgatccgtcaaaggaaccttcagaagcacataatcattctcggcgtagtggattgagttttgccgttggtggggctgcatctacaaacaagcaaagtgcagttatccctgctacacgacctttgactcgagcagaattgtcaaagaaattcagggatcattttgggtacacccttgacatcggaccatctggaattcctcacaaagatgcaggccaaggtctgttcttatccggaaaagcaaatgttggtgctgtcctagccatctatcctggtgttatatattcacctgcttactatcgatatatacctggatacccaagaattgatgtttgcaacaactatctgatcacaagatatgatggaacaataattgacgcaaaaccatggtattttggtggtgaaacaagagaattatgggatggttcagatttggtggattacaatgctatgccacctaaaggctcagagaacaactctgatcgagtgtggagaatgcttagcaagcctctagagaaaagtgtaagggaaaattttggtgaagtgcttgaacgacgaaatccccttgcttttggtcattttgcaaaccatccacctaaaggttcaagtcctaatgtcatgatctgtccatacgattttcccttgacagagaagaacatgagagtatacatccctaacgttacgtttggtggtgaagagaccattaagatgaagaggtttggctccttctatttcaagtctggaggttctgataatcaggctggtgattctctagtgctgaagacgctagtgctagtgagtacaaggtccatctgtgatgaagaactcttccttaattaccgttacagtaactcaaagcgacggccagagtggtacagccctgtcgatgaagaagaggataagaggagatggagctag

SEQ ID NO: 198 - protein, 403 aa, Sorghum bicolor
  misc_feature: Ceres ANNOT ID no.6113886
  misc_feature: Bit score of 988.2 for HMM based on sequences of FIGURE 8.
  misc_feature: Functional Homolog Of Ceres SEEDLINE ID no. ME01395 at SEQ ID NO. 172
MASLFNKIQEAIRTIAKSPMFARDPRHLQFEADVNRLFLYTSYSRLGENAEEKDAEEIIDLASKASVADQQKQVQENVHYQLRHMCQSMDNILCPDTTNDPSKEPSEAHNHSRRSGLSFAVGGAASTNKQSAVIPATRPLTRAELSKKFRDHFGYTLDIGPSGIPHKDAGQGLFLSGKANVGAVLAIYPGVIYSPAYYRYIPGYPRIDVCNNYLITRYDGTIIDAKPWYFGGETRELWDGSDLVDYNAMPPKGSENNSDRVWRMLSKPLEKSVRENFGEVLERRNPLAFGHFANHPPKGSSPNVMICPYDFPLTEKNMRVYIPNVTFGGEETIKMKRFGSFYFKSGGSDNQAGDSLVLKTLVLVSTRSICDEELFLNYRYSNSKRRPEWYSPVDEEEDKRRWS

SEQ ID NO: 199 - DNA, 497 bp, Arabidopsis thaliana
  misc_feature: Ceres SEEDLINE ID no.ME02441
  misc_feature: Encodes the peptide sequence at SEQ ID NO. 200
aagagtccaagaataaaaatcaatcagaaagaagattgaatctagatctcaagagtcaagatcgatgggtttggttgtggtcatatctctgcctctaattttcttctgtctacttcttggatttggctgctacttcctaggaaaatctcgcggccgtcgtgagatccgtacaaatcctcaggtgtatggagctcctgctccgcctcctggggctattgccgcctcctctccgccgttgtctcctcacgccaagcccgacaattctcacaacgtctgattttccttcattttctcttctttgtctgtcttgcttgtctctattggaagatgcttttgtttgacttattgtgaattgttgtaacttgtaatcttttgattgtctttagttttcttgggatgaattcccttctttatttgtgtattttcctatctctttgatgtaaataagaaagctagtaatggtttacacattgattattccaaaaaaaaaaaaaaaa

SEQ ID NO: 200 - protein, 70 aa, Arabidopsis thaliana
  misc_feature: Ceres SEEDLINE ID no.ME02441
  misc_feature: Bit score of 154.1 for HMM based on sequences of FIGURE 12.
MGLVVVISLPLIFFCLLLGFGCYFLGKSRGRREIRTNPQVYGAPAPPPGAIAASSPPLSPHAKPDNSHNV

SEQ ID NO: 201 - DNA, 543 bp, Gossypium hirsutum
  misc_feature: Ceres CLONE ID no.1921510
  misc_feature: Encodes the peptide sequence at SEQ ID NO. 202
aaagacaacaaacaaagaatttttgcagacagaaattcggcaagagttttgaagtgaagatgggtatggttgtagtcatctctctgcctctaatcatcttctgcatattacttggtaccggatgtttcttctttggaagagccaaaggtagacaagatttccgcaccaaccctcaggtttatggtgttccagctccgccgcccggtgcaccaaccacctttttcccatctcctccacataccaagcccccgccgcccgtggcagcaaccacctctttcccatctcctccacacaccaagcccaacaacttagccaatgtttaatcaagtcatttcagaattgaagttacacacacccaagttccaagattggattttatatctgggttcttttgaaaaaattgattctctttgttttctttgtttgtatacctgtgtgaatttttttaagacatgtcgtgttggttggtgtatattggttgacatgtaaaatcaataagatttatagaagctataaataaatctatactagttcaagttgctt

SEQ ID NO: 202 - protein, 87 aa, Gossypium hirsutum
  misc_feature: Ceres CLONE ID no.1921510
  misc_feature: Bit score of 101.2 for HMM based on sequences of FIGURE 12.
  misc_feature: Functional Homolog Of Ceres SEEDLINE ID no. ME02441 at SEQ ID NO. 200
MGMVVVISLPLIIFCILLGTGCFFFGRAKGRQDFRTNPQVYGVPAPPPGAPTTFFPSPPHTKPPPPVAATTSFPSPPHTKPNNLANV

SEQ ID NO: 203 - DNA, 207 bp, Populus balsamifera subsp. trichocarpa
  misc_feature: Ceres ANNOT ID no.1491256
  misc_feature: Encodes the peptide sequence at SEQ ID NO. 204
atgggtatggtcgtggtgatctctttgcctttgataatcttttgcctgcttcttggttttggatgttactacttggggaggtacaagggaagacaagatacccgtacaaatgctcaggtatttggagatcctattccaccacctggttttgctagtacgccacctcctccacctcataccaagccagacaacttgcacagtgtttag

SEQ ID NO: 204 - protein, 68 aa, Populus balsamifera subsp. trichocarpa
  misc_feature: Ceres ANNOT ID no.1491256
  misc_feature: Bit score of 142.8 for HMM based on sequences of FIGURE 12.
  misc_feature: Functional Homolog Of Ceres SEEDLINE ID no. ME02441 at SEQ ID NO. 200
MGMVVVISLPLIIFCLLLGFGCYYLGRYKGRQDTRTNAQVFGDPIPPPGFASTPPPPPHTKPDNLHSV

SEQ ID NO: 205 - DNA, 258 bp, Populus balsamifera subsp. trichocarpa
  misc_feature: Ceres ANNOT ID no.1447703
  misc_feature: Encodes the peptide sequence at SEQ ID NO. 206
atggagcatgatgttggcccacccaaaaaaaccttgaagggaatattggaaatgggtatggtagtggtgatctctttgcctttgataatcttctgcttacttcttggttttggatgctactacttggggagatacaaaggaagacaagatgtccgtacaaatgctcaagtttttggggtacctattccaccacctgatactgctagtaaaccacctcctccacctcattccaagccaggaaacttggagaatgtttag

SEQ ID NO: 206 - protein, 68 aa, Populus balsamifera subsp. trichocarpa
  misc_feature: Ceres ANNOT ID no.1447703
  misc_feature: Bit score of 130.3 for HMM based on sequences of FIGURE 12.
  misc_feature: Functional Homolog Of Ceres SEEDLINE ID no. ME02441 at SEQ ID NO. 200
MGMVVVISLPLIIFCLLLGFGCYYLGRYKGRQDVRTNAQVFGVPIPPPDTASKPPPPPHSKPGNLENV

SEQ ID NO: 207 - DNA, 633 bp, Populus balsamifera subsp. trichocarpa
  misc_feature: Ceres ANNOT ID no.1438429
  misc_feature: Encodes the peptide sequence at SEQ ID NO. 208
atgggtatggtcgtggtgatctctttgcctttgataatcttttgcctgcttcttggttttggatgttactacttggggaggtacaagggaagacaagatacccgtacaaatgctcagaagccagcaggatggactaatatcatttgttcagtacctcctactcccaacgatatcatcatcctttctcatgctgatactaaacataatatgacattcctacttcaatcaaagatgtacgaggaaccccttatttcttcacaagtgatgatgtttcatcgccaagacactgagtatttcccatcatatatgccataccagcttccctcgcaccctccagttcctccaattcctttaacacttcacacgccacaaaatcttactctcttgcgtctagtctctgacccagccccagacccattctcaagtcccgtatcccgtgctaacatcatccaacaaaactatcagggagaaaatgagagggagccaggcagccagcctcctttggccactctgaccaggcaggaagacaagcctcctttggccactccgaccaggcaggaagacaagcagagcaatccaaaaacaattacaaaagtaaaggcttccagaataccccccgcttccacagcataa

SEQ ID NO: 208 - protein, 210 aa, Populus balsamifera subsp. trichocarpa
  misc_feature: Ceres ANNOT ID no.1438429
  misc_feature: Bit score of 81.3 for HMM based on sequences of FIGURE 12.
  misc_feature: Functional Homolog Of Ceres SEEDLINE ID no. ME02441 at SEQ ID NO. 200
MGMVVVISLPLIIFCLLLGFGCYYLGRYKGRQDTRTNAQKPAGWTNIICSVPPTPNDIIILSHADTKHNMTFLLQSKMYEEPLISSQVMMFHRQDTEYFPSYMPYQLPSHPPVPPIPLTLHTPQNLTLLRLVSDPAPDPFSSPVSRANIIQQNYQGENEREPGSQPPLATLTRQEDKPPLATPTRQEDKQSNPKTITKVKASRIPPASTA

SEQ ID NO: 209 - DNA, 372 bp, Arabidopsis thaliana
  misc_feature (1)..(372): Ceres Promoter PT0888
tgactttgtaaggacaattaccaaaagagatttaaaaaggacacaacaacgaagatttggtcaactttaggttcataatcataatgccaccaacaaaaattctttcacatttttgtgaaattgtgaaagccaatataaacatttcctgttttaaatttttttatgaaataaaactcataatgttaacgaaatgaattattaaatgattgagaccataaatggaccgcacgtatagtagtgcccttccacacatgtaacgtaatcttctcctcaaccaaaaagtctaaattcatattatatatacacgaagactttcttacatcaaagaagcacaatctgaaaatcatcgaatccaaaatagttgaagtcgtc

SEQ ID NO: 210 - DNA, 481 bp, Arabidopsis thaliana
  misc_feature: Ceres CLONE ID no.109156
  misc_feature: Encodes the peptide sequence at SEQ ID NO. 211
aagagtccaagaataaaaatcaatcagaaagaagattgaatctagatctcaagagtcaagatcgatgggtttggttgtggtcatatctctgcctctaattttcttctgtctacttcttggatttggctgctacttcctaggaaaatctcgcggccgtcgtgagatccgtacaaatcctcaggtgtatggagctcctgctccgcctcctggggctattgccgcctcctctccgccgttgtctcctcacgccaagcccgacaattctcacaacgtctgattttccttcattttctcttctttgtctgtcttgcttgtctctattggaagatgcttttgtttgacttattgtgaattgttgtaacttgtaatcttttgattgtctttagttttcttgggatgaattcccttctttatttgtgtattttcctatctctttgatgtaaataagaaagctagtaatggtttacacattgattattcc

SEQ ID NO: 211 - protein, 70 aa, Arabidopsis thaliana; identical to SEQ ID NO: 200
  misc_feature: Ceres CLONE ID no.109156
  misc_feature: Bit score of 154.1 for HMM based on sequences of FIGURE 12.
  misc_feature: Functional Homolog Of Ceres SEEDLINE ID no. ME02441 at SEQ ID NO. 200

SEQ ID NO: 212 - DNA, 1001 bp, Arabidopsis thaliana
  misc_feature (1)..(1001): Ceres Promoter PT0746
aaagatcttgatggaaattaccgaggcatatattttatctatatataacaaattaaaatatcaaatatatatacaaaagctcttggtcgtttttttttcttcttttttggtacaacattcagaagctacaaactcaaatacggagttggcgtatacatggaccaaggatccaatagaaacatgtatagtattaattgagaaatacaatgtgaatagcaataattatttttaaataaattactgaaattgacagtgaaaaaaaaaagaaactactgaaacagcaaattgaataccctcatcaaagggtgaaattgttagaaacataattgaagaatcgtggaagagatcacatggttatgatttgatctttaatacaacttggtgttaatgattttgattttcaatatagaaaagattattgtcgcttattgaaccacaattaacaaattacgttactaattgtattttacatatactctaaaatcatcaaatagaagatgtagttagttaaaattgtcaaatagaagatgtagttagttactaaattctaatctggacaaaaataaagatgtggttcatacgtgtgagaagagacactaccattcttttattacatttcgttgtagtgaggctttttctgttcagtcttaaaatacaaattaaactgtccagtgtccactacactaatcacttcatgctacggcccgctaattaatgtttaaatatgtattgatcggatcagaaagaatatttgtatgatcaaaaaaaaatctgttctcttcctcacagcttttctctcagatctgtttgttcgggtttatttttgctctcttgcttagttctgtttttcactcaactacaattctttcttaagtttctatggttagatgaacttagactgttattgtttttggaaaaatccgtagatctatccgtctcaatactttgataaactaaaatctgtttctttttcttataaaattgcagattttgtatcacac

SEQ ID NO: 213 - DNA, 1000 bp, Arabidopsis thaliana
  misc_feature (1)..(1000): Ceres Promoter PT0960
ttataatatgaacagactcgtttgcaatttgatgcgtctcgcactctcgagtttttcaaacattcatctatatatgtttgataccatcacgccactaagatgattggctttaagtggatctaggaaacttctttactagcagaaaacatcaatattctaatccttactttagataaaatattatttataactgctactaaaaattaccgcctaataaagcaaatttaaccaatctgataccccaaccccaagtgacattcactctaaatggtgaaggtaaataccaatatatttagagtatttatccaaaaaaaaaattgccaatatatttcatcccagctataagatattattttcattcactagactttatttgacttggtaaaaacatgttacctaatgcaaaatttctaaaagcacattttagctatccgaccacaactctcgcaattaggcttcaggaactatagtagtttttggtaaaatttcttcattgtcaactctttaacactataaattatgtacaaggactaaagtcactttatgctacatcattacccacaaatttcataaaccattggattatcgaataattacgtatataaaaaaaataaagtacgctcttaaaaaaattagatatggttgctcgaaaagaaacatggtgcgtcgacgagtcgctacctctcacgctttctttgaataatttataatatagtctttgattttctccgcaatggtccccttcatgccatctacttactttcacctttcaagtgcttcatgactcatcaatctcacgattagaacttctctttttcttctccttctattttattaaaatttacgtatgcttcagccacttggattagttattagtgtaaggtaacactactttcgatttattcatctataaaaaccaaaattagagtgcatttcattgatctataccatcatacttgtcaacaaaaattttcttaaagaacgcataactgtttttttc

SEQ ID NO: 214 - DNA, 400 bp, Arabidopsis thaliana
  misc_feature (1)..(400): Ceres Promoter YP2585
tcctaaataactttttctagcggagagtgtctttccaataatttaataaaaatggtgtttgtatatcaaaaaaaaaagaaaaaagaaactgatcgagatagaacgtttgcagttttataaacaatttaaaaaacaaaaaaaattaaactcaatgtattttttattaattcacaaacaataataaatcataggatcgaatatttacacggtatcaaaacctactcgccgctactatataaaaattgaagtcaaatatcaaccgcaattattaaaccagccagaccaataattcataaacttaatataaacataaataaattaatgttacacaacgatatatggtagggttattactatcttcttcctctcaaaacacatctcctaaccttaagctttagac

SEQ ID NO: 215 - DNA, 2378 bp, Arabidopsis thaliana
  misc_feature (1)..(2378): Ceres Promoter YP2573
gcatactctttgatattgacatctaaagtttgtactttgaagcaacaaaaacgctctattttgcctttaccatgcgtaacagacttcgtctttaacttatatttgtttatatatttatttctgattgacacaaatcaaacatgtgctatttcataaagtcatttaaagttagctatttgttagatatctaattaagcacaatgaaatgaaatacaaatacaaatgcgtataatcaaacgctgacgtagaggaaatgactttaactatcgtaatagtaggtgttggtaaacaacggtgaacgaactataacttgatagttacaaatgatatatttaaaagtagatatcatagtgtttgtgataaaacttttttcaaaatgtaattcaaacaatttgaattgagtaggttgttgcttgaagtaggcgttcctcattatacgaatcttttgcgtttctctttgttttcatgccacgtgttgtctctaccgctcacacgccacaagaacattcttgaaaaggcttatcaaacaactttaagaacatatttctattctacccaacagtaagaaaaataaaatatatcagttatttggtttgacatagctagcgtccaactaattagaaatgatcagtttatttacattatcatccaagaaaatgcattgattcataatgattaatacaaattttcattggttattcatgggtacttttcttaccattaatgctaaaaaataaaataaaattcaccaatgtacaataagtttcttaattagcacacttttttgcgtttggtcatctgttttatgtttggttttataagtatagcattacaattattattttagctttaaaaacttaaaatgtaaattttaaacacgtgaatgtgcaagttattatgcatgtggttaataataaagggtacatgtgcgtatgagctgtgaatgtgcgtatatggcagtggacagccgtaaatgtctgaccaaaatcgttttccttatctttttacccaacagtactactactgccttaggttaaaactcatcttgtcggacgcttcttcttacaagtttacgtcttttatattctaaaattgtaacaatatattaagtttgagaaatctttcttattaattattactacgtcatttttatgtgttaactatttttgtcgaagacttttttattcttgatcaattagtccgaaaatcactactaattcgtaaacaaatttttattattaaatacctctctgtttttcctcatttgagaacgtgatataaaatcaacataatcgaatcttcacagttcacactagtttatcattataataagtgaggggattacattttaggtatttagagaaaacggggaaaagataccaaaatatcttagagacccgtggttctatatgtacattttaatttttaatttgctaaagtcagccatgaatactatagtatacctagtcagatttgatgatgatggttgttaaacccaccgctcctcctagtcaaacatcttctacaatttccaaacacattcaaaaaacgcagaaaaaaaaaaaaaaaatgtgtatatgtgttacaattcttaaaagaaaatgtaaagccagataattgttacaagagatgtacaaagctccaagtgtgaagaacatcaacatgaatatgatccatgaaatctaccaaatttccgtgcttgcactttcccatacatttttgtttttcacctaactcttacgaacctaaaataaaataaaatacaaaaaaagggagaaagatttgagcacttgtcgacacatcgtagcatcctacctctgccgacacgtggctcgagacaaatacggaactcccggtcggaacagaaacaaatacttattttgactacctgaaattcgacacgtcatcaccttctagactcaaaagagtacaaaggccaatgagactctaccattcctaacgaagtgtcacgtcacttcctatcaaacctttccttaaatacgttcactgccgcgtcactcctcttttttggtcacgtttcctatttttgtactaatacttcttcttctctctacacatattttgttggtaatcacatcgaagattcgaaattggatcacatttggtaatcaacttttttttccaaagtctccacgtgtatggacgattacatacgtacacttatttattttcgctttggtggataaactcgatgttaccaaaagtatacactatctaattaccgaaccaaaattaatctgaaacccttctatatatatatactttctttgcaataacagagtgaaagcaaacattcaaaaaaaaaaaaaaaccattttttttttcttactcaaatcttttttagtatcattctccaa

SEQ ID NO: 216 - DNA, 614 bp, Triticum aestivum
  misc_feature: Ceres CLONE ID no.1053866
  misc_feature: Encodes the peptide sequence at SEQ ID NO. 217
cccagcgcagagcaccgcagcaattcgatcccaagcatccccccaccaacctcaccatcctcgtaccgcacgtccaggcagctaatcagtcaagctcaagcatccaagccggcctcggattgaaggcatccatccgggagggaggggaatggggttcgtgctggtgatctcgctgcccttcatattcttcaccatcctgctcggcttcggctgctacttcctcggcaagcacaagggccgcgaggagatgcgcgccggcgtcggcgcccagatctacggcacgccgctgccgccgcctggcgtggccgggcagtccccggggccgtacccggtcccggttccgatgaagaaggagggccccgacgccgtctgatcggtcgagcttcctcctcctcctcggctggagcgttggtgttgtttgtttactgggtttgattattaccgtgtacatggagtcatttgttgctcgtttcttgtgtggtgtttactgtgaaggaggaagggatgttgatccggtgtgatgatttgtgatcacagttgcgtttctatgagatgcgcaaatcgatgtaatgaatattagtttgtgataatcaatcaaccgttgcttggtttgt

SEQ ID NO: 217 - protein, 74 aa, Triticum aestivum
  misc_feature: Ceres CLONE ID no.1053866
  misc_feature: Bit score of 157.8 for HMM based on sequences of FIGURE 12.
  misc_feature: Functional Homolog Of Ceres SEEDLINE ID no. ME02441 at SEQ ID NO. 200
MGFVLVISLPFIFFTILLGFGCYFLGKHKGREEMRAGVGAQIYGTPLPPPGVAGQSPGPYPVPVPMKKEGPDAV

SEQ ID NO: 218 - DNA, 615 bp, Zea mays
  misc_feature: Ceres CLONE ID no.1526732
  misc_feature: Encodes the peptide sequence at SEQ ID NO. 219
tgccccaaagcaaagcaaagcttcaaagcatctctgctaggattttagcgagcggcaacgacgagcgacccaaaaaagcaatcattagtcaccatatctggtcctctcgctccacccccctcctctgcgacttgaggcaggacaggaggcacagacgtgcaatggggttcgtgctggtggtctctctgcccttcatcttcttctccatcctcctcggcttcggctgctacttcctcggcaagcacaggggccgggaggagatgcggaccggcatcggcgtgcagatctacggcacgccgctgccgccgcccggcgtcgtcggagcctcctcgccgccgcctgagccgttccacagcaagaaacaatggtccgaggctgtgtgactgagattcagacgtctctccatccatccattctactactactacatatatgtcttggtggtgatgttggatttatattcttagttctttcttctttaatttcgccctggctgtcttgagagtgtagattgagagtcaaatctgtgcttgtgtctaaagatggtgtgtgtggatgttgtgatacgattgcaatcacactttatatcttctgtaatcaagcaaaaaatttccg

SEQ ID NO: 219 - protein, 73 aa, Zea mays
  misc_feature: Ceres CLONE ID no.1526732
  misc_feature: Bit score of 170.7 for HMM based on sequences of FIGURE 12.
  misc_feature: Functional Homolog Of Ceres SEEDLINE ID no. ME02441 at SEQ ID NO. 200
MGFVLVVSLPFIFFSILLGFGCYFLGKHRGREEMRTGIGVQIYGTPLPPPGVVGASSPPPEPFHSKKQWSEAV

SEQ ID NO: 220 - DNA, 1251 bp, Arabidopsis thaliana
  misc_feature (1)..(1251): Ceres Promoter PT0998
agaatatttctactcataaacaataagaataattcacaatatcacatgctagttatttagtttaagttttaccaagacaaagagctggtggattactgtgaaaatgtccacttatgcatattaaaaatttggtagactaatcgactagttgctaattgttccataatttcacaaaaaaaacaaaaaacaaataacctagcccagtcaccactatatcattgtggcagatttattaaagttagccttagcccccaacataatttgaaaaggcaagcaaaacaaagacaaacttgcaaaagtctaatctttctgaaacaaaacatataaattaaaatattaatttgtttatttaaatgcaatgtcgtattgaaattaaaaatctcaatgttcttgttgttttgtgctaagttctgaaaagttttgaataacaacacatacaaagtactctgttacttatactgtaacttgtaacttccattacagagagagagactacactggctctataatgtacatgaagatgtgtaattgtgtaatttctcttgtattaatattaacttcacctgttcttgtaagagataaactataaagcattaaaggaacttgctttaggtgcaactaaactggttttggacaagtgtagcaacatgaaacatgaaaattcaaagggtaaggctccacctaaaatttataaagatgtgatgcaatgttccaaattatatctacaaaatatttgtttcgtgtggaacaagccctctttcatatgaatagttctacacaagcatgaattagatattactaattaaactattaaagaactcgacctacaaaactgtctatatatttccctctttcgaattacgtatctgtgtcaaagattgtcatcaccaatctacatatttttattcatcagtaccatacacgtatatataatatatctatttcaaatataaaaaaaaaactttggaaaaataaaacattgtctggttttatagtggattaggtaaaaccaaaaaaagaaaagcttacttgatccaacatacatactaactctcaacagatacaaacacaagtttattatttaccaactcttatctcaaaagattcttctcaataatttatcctcctttgacccctatatagacacacatttgacaccatatgtcatgcacaaaacatcatcatctcttgatctatctttcagttctcttgtcaattttcccccaaaaagaaaaaggatataagaagata

SEQ ID NO: 221 - DNA, 1000 bp, Arabidopsis thaliana
  misc_feature (1)..(1000): Ceres Promoter PT1026
ccaaactgatcatttgtataacctttcttgaaaatcatagatctatcttaaaactaaactgtaagctttttttttacttttcaattccctaagattatgtctccactttaatattttaccatttctcttaaacagaaaaattgaatatacctatttataagtattcaaaatttatttttaggtagaatttagcgcaaaagtttattaaactttacgtttacaatctcattatttaatattcacgtgaatgaatattttgacatggtaaatataatataacactataaataatatatttacatatgatgaaaagaagaataatttgataaattagaaattcacataatacatgaaataatcacatattaattccaccctaactagctaaatgataaaaataaaatcatataaatcagttcataaaacaaaaaatgtctcgggaaaaaaaaaacactcttccaaaagagacatgtaatagtcaatttatttctattttcataatcatcgttaatcctcattgcatgtggtacaattattctaataagaaaagtgaatcgtcccaataaataatcctaaaatgccgtcttaaaaaaggcaatctataaaattatttataaatatctaagaatgagttgtctactttccattgattaaaaagagaaaatatcataaacaaaaaaaaaaagtcagagaagttaaaccaaaagcaacaaaaaagaaaaaaagaaagaataatcaagagagaggagaagaggacggtggaagatattttgcagttgaagaaaatatctttgatattttttgtgtttgaaatatctaaaaccaaaaagtttcatctcttcattccgccaaattgactggtgatgacgtggcaactttacccacgtgtaaaagcgtctacaactgtatcgtttcttttgatattttgtttctctctttctctctgatatttttcattttcttcttcttctctctctctctccacaaagataagccaaca

SEQ ID NO: 222 - DNA, 513 bp, Zea mays
  misc_feature: Ceres CLONE ID no.211136
  misc_feature: Encodes the peptide sequence at SEQ ID NO. 223
tcatgtcccaaagcaaagcaaagcttcaaagcatctctgcttggattttagcgagcggcaacgacgagcgacccaatggggttcgtgctggtggtctctctgcccttcatcttcctctccatcctcctcggcttcggctgctacttcctcggcaagcacaggggccgggaggagatgcggaccggcgtcggcgcgcagatctacggcacgccgctgccgccgcccggcgtcgtcggagcctcctcgccgccgcctgagccgttccacagcaagaaacaatggtccgaggctgtgtgactgagattcagacgtctctccatccatccattctactactactacttatatgtcttggtggtgatgttggatttatattctttcttctttaatttcgccctggctgtcttgagagtgtagattgagagtcaaatatgtgcttgtgtggatgttgtgatacgattgcaatcacactttatatcttctgtaatcaagcaaaaaccaatgcgttgcagc

SEQ ID NO: 223 - protein, 73 aa, Zea mays
  misc_feature: Ceres CLONE ID no.211136
  misc_feature: Bit score of 169.1 for HMM based on sequences of FIGURE 12.
  misc_feature: Functional Homolog Of Ceres SEEDLINE ID no. ME02441 at SEQ ID NO. 200
MGFVLVVSLPFIFLSILLGFGCYFLGKHRGREEMRTGVGAQIYGTPLPPPGVVGASSPPPEPFHSKKQWSEAV

SEQ ID NO: 224 - DNA, 603 bp, Zea mays
  misc_feature: Ceres CLONE ID no.446737
  misc_feature: Encodes the peptide sequence at SEQ ID NO. 225
aaagcgaagctaagcaaagcgaagcttcaaagcatcctcccctgcgagaagagaggaggacaatggggttcgtgctggtggtctctttgcacttcattttcctctccatccttctcggcttcggctgcttcttcctcggcaagcacaggggccgggaggagatgcgaaccggcgtcggcgcgcaggtctacggcacgccgctgccgccgcccggtgtcgtcggagtcccatcgccgccgactgagccgattcacgccaagaaaccagggcccgaagccgtctgattgggatccatttcgtttctacctactactgcctatgttttggtgacgttggatttattctttcttctttattttcgtccaggccgtgtcgaggggtgtaagctgagagtgaatatatgtttgtgtctaaaaattgttcattgttacgacttacgaggggagggggtgatggtgtgtgtatgttgtgatatgatttgcaatcacggcaagcaaaaccagatgtcttgtgtcactgtcctgactagctggtgagtggtggtgtgtgtatggatatcacatattttgtaaagtgtttttagagattacattgagcttgttt

SEQ ID NO: 225 - protein, 73 aa, Zea mays
  misc_feature: Ceres CLONE ID no.446737
  misc_feature: Bit score of 147.7 for HMM based on sequences of FIGURE 12.
  misc_feature: Functional Homolog Of Ceres SEEDLINE ID no. ME02441 at SEQ ID NO. 200
MGFVLVVSLHFIFLSILLGFGCFFLGKHRGREEMRTGVGAQVYGTPLPPPGVVGVPSPPTEPIHAKKPGPEAV

SEQ ID NO: 226 - protein, 63 aa, Zea mays
  misc_feature: CERES CLONE ID no.101142179
  misc_feature: Bit score of 132.3 for HMM based on sequences of FIGURE 12.
  misc_feature: Functional Homolog Of Ceres SEEDLINE ID no. ME02441 at SEQ ID NO. 200
MGFVLVVSLPFIFLSILLGFGCYFLGKHRGREEMRTGVGAQIYGTPLPPPEPFHSKKQWSEAV

SEQ ID NO: 227 - DNA, 515 bp, Zea mays
  misc_feature: Ceres CLONE ID no.370528
  misc_feature: Encodes the peptide sequence at SEQ ID NO. 228
aaaagcgaagcgaagcaaagcaaagcttcaaagcatcctcccctgcgagaagagaggaggacaatggggttcgtgctggtggtctctttgcacttcatcttcctctccatccttctcggcttcggctgcttcttcctcggcaagcacaggggccgggaggagatgcgaaccggcgtcggcgcgcaggtctacggcacgccgctgcgccgcccggcgtcgtcggagtctcatcgccgccgcctgagccgattcacgccaagaaacaagggcccgaagccgtctgattgagatccattcgtttctacctactactgcctatgttttggtgatgttggatttattctttcttctttattttcgtccagaccgtgtcgacgggtgtaagctgagagtgaatatatgtttgtgtctaaaaattgttcattgttacgacttacgaggggagggggtgatggtgtgtgtatgtcgtgatatgatttgcaatcacggcaagcaaaaaccagatgtcttgtgtc

SEQ ID NO: 228 - protein, 74 aa, Zea mays
  misc_feature: Ceres CLONE ID no.370528
  misc_feature: Bit score of 102.6 for HMM based on sequences of FIGURE 12.
  misc_feature: Functional Homolog Of Ceres SEEDLINE ID no. ME02441 at SEQ ID NO. 200
MGFVLVVSLHFIFLSILLGFGCFFLGKHRGREEMRTGVGAQVYGTPLRRPASSESHRRRLSRFTPRNKGPKPSD

SEQ ID NO: 229 - DNA, 407 bp, Panicum virgatum
  misc_feature: Ceres CLONE ID no.2026154
  misc_feature: Encodes the peptide sequence at SEQ ID NO. 230
aaaaacaaagcacagggcacctcatctcccttcaaagaacactctgctttgcttgtttttcttgttctttcttcacgttctcacctgctcctccagctagtgggaattccggagcaggaagagaggaagcatggggttcgtgctagtgatctccctacctttcatcttcttcaccatcctgctcgggttcggctgctacttcctcggcaagcacagggggcgggaggagatgcggtcaggcgtcgccgcccagatatacggcacgccgctgccgccgcccggcgtcgtgggctgggcctcgccggcgcatgagccgttcgccatgaagaaagaaggggctgagaacgtctgagtgggatgatgtttctggatttgtttaaatgataattaattcctttcgtcgatgc

SEQ ID NO: 230 - protein, 73 aa, Panicum virgatum
  misc_feature: Ceres CLONE ID no.2026154
  misc_feature: Bit score of 170.9 for HMM based on sequences of FIGURE 12.
  misc_feature: Functional Homolog Of Ceres SEEDLINE ID no. ME02441 at SEQ ID NO. 200
MGFVLVISLPFIFFTILLGFGCYFLGKHRGREEMRSGVAAQIYGTPLPPPGVVGWASPAHEPFAMKKEGAENV

SEQ ID NO: 231 - DNA, 539 bp, Panicum virgatum
  misc_feature: Ceres CLONE ID no.1770718
  misc_feature: Encodes the peptide sequence at SEQ ID NO. 232
tgagcttagcggagctgaaacaaagcacaggccaccacctcaaagcatcctctgcttcgcttgctttcttgggtcttccaccaggctctctccagtctccactgctcctgcaggcaagtcagaattccggagcaagagaggagacatggggttcgtgctggtgatctccctgcccttcatcttcttctccatcctgctcggcttcggctgctacttcctcggcaagcacaggggccgggaggagatgcgggcaggcgtcggcgcgcagatctacggcacgccgctgccgccgcccggcgtcgtgggcggggcctcgccggcgcacgagccgttcgccatgaagaaagaagggcttgagaacgtctgagtgggatgatgtttctgaatttgtttaaatgataattaattcctttcgtcgatgcaatgtacattgagcaatttatgcatgtgtttgttactttgttgaggggaaagatggtgacgcggtgtgatataatgtaatcacagtatgagacaataacagtgtttctcattgattc

SEQ ID NO: 232 - protein, 73 aa, Panicum virgatum
  misc_feature: Ceres CLONE ID no.1770718
  misc_feature: Bit score of 166.1 for HMM based on sequences of FIGURE 12.
  misc_feature: Functional Homolog Of Ceres SEEDLINE ID no. ME02441 at SEQ ID NO. 200
MGFVLVISLPFIFFSILLGFGCYFLGKHRGREEMRAGVGAQIYGTPLPPPGVVGGASPAHEPFAMKKEGLENV

SEQ ID NO: 233 - protein, 71 aa, Oryza sativa subsp. japonica
  misc_feature: Public GI ID no.115455695
  misc_feature: Bit score of 157.1 for HMM based on sequences of FIGURE 12.
  misc_feature: Functional Homolog Of Ceres SEEDLINE ID no. ME02441 at SEQ ID NO. 200
MGFVLVISLPFIFFSILLGFGCYFLGKHKGREEMRTGVGAQVYGTPLPPPGVGAPPPEPFTAKKDGPENLV

SEQ ID NO: 234 - DNA, 228 bp, Sorghum bicolor
  misc_feature: Ceres ANNOT ID no.6034829
  misc_feature: Encodes the peptide sequence at SEQ ID NO. 235
atggggttcgtgctggtggtctccctgcctttcatcttcctctccatcctgcttggcttcggctgctacttcctcggcaagcacaggggccgggaggagatgcggaccggcgtcggcgcgcagatctacggcacgccgctgccgccgccgggcgtcgtcggagtctcctcgccgccgcctggggctgagccgttccacgccaagaaacaggggcccgaggccgtctga

SEQ ID NO: 235 - protein, 75 aa, Sorghum bicolor
  misc_feature: Ceres ANNOT ID no.6034829
  misc_feature: Bit score of 157.0 for HMM based on sequences of FIGURE 12.
  misc_feature: Functional Homolog Of Ceres SEEDLINE ID no. ME02441 at SEQ ID NO. 200
MGFVLVVSLPFIFLSILLGFGCYFLGKHRGREEMRTGVGAQIYGTPLPPPGVVGVSSPPPGAEPFHAKKQGPEAV

SEQ ID NO: 236 - DNA, 156 bp, Sorghum bicolor
  misc_feature: Ceres ANNOT ID no.6064505
  misc_feature: Encodes the peptide sequence at SEQ ID NO. 237
atgctcgaggttgtgatctccatcccagcgatcctcctgctgatcctcctggccgtcgggtgctacctgctcggccggaaccgaggccgcgccgcggcgtcgcagcagttcgcgccgccggcgccgccgccagggctctcgccctcgcccaagtaa

SEQ ID NO: 237 - protein, 51 aa, Sorghum bicolor
  misc_feature: Ceres ANNOT ID no.6064505
  misc_feature: Bit score of 18.8 for HMM based on sequences of FIGURE 12.
  misc_feature: Functional Homolog Of Ceres SEEDLINE ID no. ME02441 at SEQ ID NO. 200
MLEVVISIPAILLLILLAVGCYLLGRNRGRAAASQQFAPPAPPPGLSPSPK

SEQ ID NO: 238 - DNA, 1250 bp, Arabidopsis thaliana
  misc_feature: Ceres SEEDLINE ID no.ME02927
  misc_feature: Inplanta Sequence
  misc_feature: Encodes the peptide sequence at SEQ ID NO. 239
aaacacacacatatacacccaaacgttatgtaactgcaaaaaaaatatcgaaacgagattctacaattagtctctagtcaaagagcttcatggcaatggtgtgaccccaaagttagtcttcacatgtttcttaagtttcaaacattgaatttttttccttttataaatagttaagacttatcttcattttctaaaatagtcaagatttatattcctcttaaaaaataatttatttccttcctaagaagaattattagatttattttctttgctagtatagattgatgaaagtgaggaaatgggagaagaaatgaagaacacaggatgtgtcttcttcttctaagtcactaacaaaatcaacaaagaggagaagccattattatataatagagagattgagagaagagatttatccaaaaaaatattgcaattcttcttggagtgaataatgccagtccctcttgcaccatatccaacacctccggcaccggcactggctccgtcgtacaacactcctccggcaaatggaagtacaagtgggcagagccagttagtgtgttcaggttgcagaaaccttctgatgtatcccgtcggagcaacctccgtctgttgcgccgtctgtaacgccgtcacggccgttcctccgcccggaacggagatggcacagttggtatgtggaggatgtcatacactcttaatgtacattcgtggagctacaagtgttcaatgttcttgttgtcacactgttaatctcgccctcgaagcaaaccaagtagcgcatgtgaattgcggaaactgcatgatgctactaatgtatcaatatggagcaagatcagtgaaatgtgccgtttgtaactttgtcacatctgttgggggttcaacgagcacgactgattcgaagtttaacaattaaaacttggatctatctacctatcaatacatattgagttatgagcaatatagaggaagcatcaaatctttttcactctctcttcgatcaagaatccggcagtgatgagtttgaaaccattttcggaagtaaatgaaatatgtaattcgtcgaaatttctgactttggtctctttgtccgtttgtatagagctatctctcttctttggtttttgttttgttctcttaagaaaaatttgattcaccagtttgtaagagtgattcagaaatcaaagctagactttttatgcatgaaaaaaatagattgttttaaaaaaaaaaaaaaaaaaaaaaaaaaaaaa

SEQ ID NO: 239 - protein, 154 aa, Arabidopsis thaliana
  misc_feature: Ceres SEEDLINE ID no.ME02927
  misc_feature: Bit score of 409.4 for HMM based on sequences of FIGURE 14.
  misc_feature (114)..(138): Pfam Name: zf-LSD1 Pfam Description: LSD1 zinc finger
MPVPLAPYPTPPAPALAPSYNTPPANGSTSGQSQLVCSGCRNLLMYPVGATSVCCAVCNAVTAVPPPGTEMAQLVCGGCHTLLMYIRGATSVQCSCCHTVNLALEANQVAHVNCGNCMMLLMYQYGARSVKCAVCNFVTSVGGSTSTTDSKFNN

SEQ ID NO: 240 - DNA, 452 bp, Zea mays
  misc_feature: Ceres CLONE ID no.475293
  misc_feature: Encodes the peptide sequence at SEQ ID NO. 241
atacgtgcctcgcttctttttcctctttcgattccaggtatgcagaaccagatcatgtgccatgcttgccggacccttctgctctacccgcgtggcgcgtccagcgtctgctgcgcggtttgccaggccatcaccaccgtgccgccaccaggattggagatggctcagcttatatgtggtggctgtcgaactttgctgatgtatactcgcagtgcagacaccgtaaggtgttcatgttgcaacacagtgaaccttgttagaccagtgaataatatagctcatgtgaactgcggccagtgccggacaactttgatgtatccatacggcgcaccttcagtaaaatgtgccgtatgcaattatgtcacagctactggagtaaatactgtggcacccaccccatctgcgaggccaacatcagatgggtcttcatatagtggctcatctacttctgc

SEQ ID NO: 241 - protein, 137 aa, Zea mays
  misc_feature: Ceres CLONE ID no.475293
  misc_feature: Bit score of 168.3 for HMM based on sequences of FIGURE 14.
  misc_feature (84)..(108): Pfam Name: zf-LSD1 Pfam Description: LSD1 zinc finger
  misc_feature: Functional Homolog Of Ceres SEEDLINE ID no. ME02927 at SEQ ID NO. 239
MQNQIMCHACRTLLLYPRGASSVCCAVCQAITTVPPPGLEMAQLICGGCRTLLMYTRSADTVRCSCCNTVNLVRPVNNIAHVNCGQCRTTLMYPYGAPSVKCAVCNYVTATGVNTVAPTPSARPTSDGSSYSGSSTS

SEQ ID NO: 242 - DNA, 1491 bp, Gossypium hirsutum
  misc_feature: Ceres CLONE ID no.1835943
  misc_feature: Encodes the peptide sequence at SEQ ID NO. 243
aatcctctcttttctctctctatttctcaccacttcatctgcatattgaacagtatgggagaaagcttgatgctctctggttctagacagtgaactattgaaaggagagtttagctctgtctgattttacaatgccagttccccttgcgccatatcccacacctccagcaccctacactcctcctgctgccaatggtatcttgttctcttctatctgttctgcaacagatttttctttaaacaatgtgaattccattgctatttagttgaaggacctctttcattagccttttttttcattcagaaaagagttaagtctcattgtaactacatatatgattagcaaatccaaatagaatttctgatatctgattcaggacgtctgcttcaatttcgttttgcccccttttgcttcttttttttttttccgtttttttctgatgttcatgctgtgcaagggtatggctttggcattaagatacacaggttgttatggatgtaaagtaccaatattacaagtctagtttggcttctaacaagcttggcctcatcaacaaattggtcaaagacaggagaatttatgaattaagtcattaacctttctgcatctacaaaagttactgtatttctactctcttttttttttttttactttccattgacaactgatctagtggccaaacctatgctaaccaggtgctcaaagccaacttgtgtgttccggttgtcgaaatttattgctctatccagttggagcaacctctgtgtgttgtgctgtttgcaatgcagtaacagcagtgccgcctcccggtacatcatctgctatttacttgattgaatcttctttttggaaagcctgtgtataaattgtaagtcaaacttctgaaatatacaggcacagaaatggcacagttggtttgcggaggctgtcataccttattaatgtacatccgcggagcaacaagcgttcaatattcgtgttgtcacactgtcaatctggccttggaagcaaatcaggtggcacatgtaaattgtgggaactgcaggatgttactaatgtaccagtatggagcgagatccgtaaaatgtgcagtttgcaattttgtgacatcagttgggggctcagctagtgctgctgaacagaagttcaacagctgagactatattagaccccaagtcaaatattaaaagcaacaagtttgctttgcacgttataaatatcttccaccgaggttgcgtcccatcggcaaatggaggaaactcctcctcctcgcattgtattgagttatttttccttgcgtgacatatgaaataagcggttttgggtagctggttggatgcattataagtaattccatcagagaagacgttttttaacagtttgaacaatcggttatcttccgagtccagataagataaactttgttttcttttgatttgctatgaatatgagtggcaataaatacagggcataaagttcatctctgatac

SEQ ID NO: 243 - protein, 84 aa, Gossypium hirsutum
  misc_feature: Ceres CLONE ID no.1835943
  misc_feature: Bit score of 143.9 for HMM based on sequences of FIGURE 14.
  misc_feature (44)..(68): Pfam Name: zf-LSD1 Pfam Description: LSD1 zinc finger
  misc_feature: Functional Homolog Of Ceres SEEDLINE ID no. ME02927 at SEQ ID NO. 239
MAQLVCGGCHTLLMYIRGATSVQYSCCHTVNLALEANQVAHVNCGNCRMLLMYQYGARSVKCAVCNFVTSVGGSASAAEQKFNS

SEQ ID NO: 244 - DNA, 711 bp, Gossypium hirsutum
  misc_feature: Ceres CLONE ID no.1912352
  misc_feature: Encodes the peptide sequence at SEQ ID NO. 245
attttctatcaggccagcaatggcaaacggttttcatgaatgttgtggttgctcatggacatccaaaacaggagatttaatctcttcaaactagcaagatttcctcaagtttggttgccttctcaaaatagcctttggccgagctggtggattgtggagctgttctttttgcctgctattttgttcatataactgaagcaatttctgttctccaaagaaatcctctagtttcttgttgctagtaaagcactattagtgtatattttgtttgcaacttctactgatttcagagttcaccgctgaagactttcttgccctctcatctgcgcttcctgcacttttcccagggcttcatgcagggcaaagcagccggtttccgacgcctgatagccgccggaatctgcgagatctccacgagcagcgtcctcggataaggcagccggcacggcaatgccggttccccttgccccgtatccaactcctccggtgccattcacaccccccaatggggcccaaagccagcttgtctgcaccgggtgccggaatcttctcatgtatccagctggtgcgacgtctgtctgctgtgcagtttgcagcaccgtcaccgccgtgccggctccaggaactgagatggcacagttagtttgcggaggatgccacactctcctgatgtacatacgtggggcgacaagtgtacaatgttcttgctgc

SEQ ID NO: 245 - protein, 87 aa, Gossypium hirsutum
  misc_feature: Ceres CLONE ID no.1912352
  misc_feature: Bit score of 149.6 for HMM based on sequences of FIGURE 14.
  misc_feature (27)..(51): Pfam Name: zf-LSD1 Pfam Description: LSD1 zinc finger
  misc_feature: Functional Homolog Of Ceres SEEDLINE ID no. ME02927 at SEQ ID NO. 239
MPVPLAPYPTPPVPFTPPNGAQSQLVCTGCRNLLMYPAGATSVCCAVCSTVTAVPAPGTEMAQLVCGGCHTLLMYIRGATSVQCSCC

SEQ ID NO: 246 - DNA, 447 bp, Brassica napus
  misc_feature: Ceres CLONE ID no.978312
  misc_feature: Encodes the peptide sequence at SEQ ID NO. 247
aatttggattggctctcgagttcgatcttcccttcccatcttctccaatcgagatgcaggaccagctcgtgtgtcatggctgtagaaacacattgctctatcctagaggagctaccaacgttcgttgtgccttatgcaacactgtcaacatgatccctcatcatccttctcctcatgctcgtgcagggatggacatggctcacattgtatgtggtggttgtcgaactatgcttatgtatacccgtgggggaactagcgtcagatgctcttgctgtcagactctcaaccttgttccagcaccaacaccatccaatcagtttgcgcatatcaactgtgggaactgtcggacgacactcatgtatccgtacggtgcatcatctgttaaatgcgctgtttgccagttcgttactaacgttaatctgatgggcaatggaagggtgmcttaac

SEQ ID NO: 247 - protein, 130 aa, Brassica napus
  misc_feature: Ceres CLONE ID no.978312
  misc_feature: Bit score of 131.8 for HMM based on sequences of FIGURE 14.
  misc_feature (94)..(118): Pfam Name: zf-LSD1 Pfam Description: LSD1 zinc finger
  misc_feature: Functional Homolog Of Ceres SEEDLINE ID no. ME02927 at SEQ ID NO. 239
  misc_feature (130)..(130): Xaa is any aa, unknown, or other
MQDQLVCHGCRNTLLYPRGATNVRCALCNTVNMIPHHPSPHARAGMDMAHIVCGGCRTMLMYTRGGTSVRCSCCQTLNLVPAPTPSNQFAHINCGNCRTTLMYPYGASSVKCAVCQFVTNVNLMGNGRVX

SEQ ID NO: 248 - DNA, 932 bp, Zea mays
  misc_feature: Ceres CLONE ID no.1437985
  misc_feature: Encodes the peptide sequence at SEQ ID NO. 249
ttggattggcctctttgcatatctgctctttagagttggccgggtctgcaatcggatcctctcttccccatcttcccaatcgaagcttttggctttgaattggatttgggtttcaaaaagccacctccttttcttcttcttatcagatatgcaggaccagctggtgtgtcatggatgtagaaatacattgatgtatcctagaggagcaaccaatgtgcgttgtgcgttatgtcacattgtcaacatggttcctcttcatcctcatcctcctcctcctcatcatgctcatgcagggatggacatggctcacattgtatgtggtggttgccgaactatgcttatgtacacgcgtggggctagtagtgtaagatgctcttgctgtcagactgtcaaccttgtcccaggacccccaccgtccaatcaggttgcgcatatcaactgcgggaactgccggacgacactcatgtacccttacggtgcatcatctgttaaatgcgctgtttgccagtttgttactaacgttaacatgagcaatggaagggtgcctctcgcaagtaaccggccaaatggaacagcttctcccgggacaatgccctctacatccacttcaacaccaccgtctcagacacaaactgttgtagtagagaacccaatgtccgttaacgaaagtggaaagttggtgagcaacgttgtggttggagtgacaacaggccaaaaataacttttaaagaatgatttgatctgaaagatcaaaattggtttcatctatccctgcgtctggtttgtgcatattacatactgttgatgaacactttttttttttgttaaaaaaaaagttgatgaacacaaaggttttttggttcagtaatgtggcaatcctgtttgtagactccattgaccatttgtggcattgttaatgtatgtattactat

SEQ ID NO: 249 - protein, 138 aa, Zea mays
  misc_feature: Ceres CLONE ID no.1437985
  misc_feature: Bit score of 145.1 for HMM based on sequences of FIGURE 14.
  misc_feature (98)..(122): Pfam Name: zf-LSD1 Pfam Description: LSD1 zinc finger
  misc_feature: Functional Homolog Of Ceres SEEDLINE ID no. ME02927 at SEQ ID NO. 239
MQDQLVCHGCRNTLMYPRGATNVRCALCHIVNMVPLHPHPPPPHHAHAGMDMAHIVCGGCRTMLMYTRGASSVRCSCCQTVNLVPGPPPSNQVAHINCGNCRTTLMYPYGASSVKCAVCQFVTNVNMSNGRVPLASNR

SEQ ID NO: 250 - protein, 189 aa, Arabidopsis thaliana
  misc_feature: Public GI ID no.30685085
  misc_feature: Bit score of 147.4 for HMM based on sequences of FIGURE 14.
  misc_feature (100)..(124): Pfam Name: zf-LSD1 Pfam Description: LSD1 zinc finger
  misc_feature: Functional Homolog Of Ceres SEEDLINE ID no. ME02927 at SEQ ID NO. 239
MKVADMQDQLVCHGCRNLLMYPRGASNVRCALCNTINMVPPPPPPHDMAHIICGGCRTMLMYTRGASSVRCSCCQTTNLVPAHSNQVAHAPSSQVAQINCGHCRTTLMYPYGASSVKCAVCQFVTNVNMSNGRVPLPTNRPNGTACPPSTSTSTPPSQTQTVVVENPMSVDESGKLVSNVVVGVTTDKK

SEQ ID NO: 251 - protein, 184 aa, Arabidopsis thaliana
  misc_feature: Public GI ID no.30685083
  misc_feature: Bit score of 140.9 for HMM based on sequences of FIGURE 14.
  misc_feature (95)..(119): Pfam Name: zf-LSD1 Pfam Description: LSD1 zinc finger
  misc_feature: Functional Homolog Of Ceres SEEDLINE ID no. ME02927 at SEQ ID NO. 239
MQDQLVCHGCRNLLMYPRGASNVRCALCNTINMVPPPPPPHDMAHIICGGCRTMLMYTRGASSVRCSCCQTTNLVPAHSNQVAHAPSSQVAQINCGHCRTTLMYPYGASSVKCAVCQFVTNVNMSNGRVPLPTNRPNGTACPPSTSTSTPPSQTQTVVVENPMSVDESGKLVSNVVVGVTTDKK

SEQ ID NO: 252 - DNA, 462 bp, Zea mays
  misc_feature: Ceres CLONE ID no.1705168
  misc_feature: Encodes the peptide sequence at SEQ ID NO. 253
gaactgagatggcgcagctagtgtgcggaggatgccgcaccctcctcatgtacatacgcggcgcgacgagcgtgcagtgttcttgctgccacactgtgaacctggctatggaagcaaatcaagtcgcgcatgtgaactgcgggaactgccgcatgctgctcatgtaccagtacggggctcggtccgtgaagtgcgcggtctgcagttttgtgacatcggttggaacctcacctggtgcagagcagaagcccagcagctgagctgatagtgtccctggaagtgctgtgagaccacctatgaaaaggatgctttgagtgcacatgtatagagttcttccctgaagcgattctttcactttcttttctcttgttttcttttgttttcttttcttttttggttcctcctcaccatctccaccccacccgtccacttctgcgttccttcgatggatctcgcgagccc

SEQ ID NO: 253 - protein, 83 aa, Zea mays
  misc_feature: Ceres CLONE ID no.1705168
  misc_feature: Bit score of 138.5 for HMM based on sequences of FIGURE 14.
  misc_feature (6)..(30): Pfam Name: zf-LSD1 Pfam Description: LSD1 zinc finger
  misc_feature: Functional Homolog Of Ceres SEEDLINE ID no. ME02927 at SEQ ID NO. 239
MAQLVCGGCRTLLMYIRGATSVQCSCCHTVNLAMEANQVAHVNCGNCRMLLMYQYGARSVKCAVCSFVTSVGTSPGAEQKPSS

SEQ ID NO: 254 - DNA, 598 bp, Musa acuminata
  misc_feature: Ceres CLONE ID no.1713823
  misc_feature: Encodes the peptide sequence at SEQ ID NO. 255
  misc_feature (549)..(549): n is a, c, t, g, unknown, or other
accaccaccacaactctcctcgaatagttacaggactcggaggaggagaaaactatagtaagcagatgagagacgagcaaaaaagatcaacttggtgaggtattcccggatcagacacagtaatcgaaggtgggcagagccaagttgtctgttgtgggtgtagaaatctcctcatctatccaggtggggcaacatcagtatgctgtgccgtctgcagtgcagtgaccactgtacctccacctggaacagaaatggcacagttaatttgtagaagctgccacacactgttgatgtatgttcgtggagcgagtagggttcagtgttcttgctgtcacacagtcaatctggctccagaagcaaaccaggttgcacatgtcaattgcgggaactgccatatgctgctgatgtatcaatatggagcaagatcagtgaagtgcgcagtttgcagctttgtcacctcagttggggcttcaccaagcactgagcagaagcctggcaactgaaaccttggaatccggtgaattggctgcctatgacttgaaccaactnccatcagcttaagagagtcccacagttaatgtatagagcttcttcccaa

SEQ ID NO: 255 - protein, 83 aa, Musa acuminata
  misc_feature: Ceres CLONE ID no.1713823
  misc_feature: Bit score of 116.0 for HMM based on sequences of FIGURE 14.
  misc_feature (44)..(68): Pfam Name: zf-LSD1 Pfam Description: LSD1 zinc finger
  misc_feature: Functional Homolog Of Ceres SEEDLINE ID no. ME02927 at SEQ ID NO. 239
MAQLICRSCHTLLMYVRGASRVQCSCCHTVNLAPEANQVAHVNCGNCHMLLMYQYGARSVKCAVCSFVTSVGASPSTEQKPGN

SEQ ID NO: 256 - DNA, 570 bp, Triticum aestivum
  misc_feature: Ceres CLONE ID no.1052130
  misc_feature: Encodes the peptide sequence at SEQ ID NO. 257
gttatactgagcaaaccaaacttattcgtctcgaaatctgcaccagatcgagctcagcaacgcgagccgagccggaggcgttcgtctgcccggggtggcgccatgcggatccgcctcttcctctgaaccgggcaagcgcgagccgccttcctcctcgtgctcgacggcggcgacgagcgtcggtggccgcatagcaaagtccagcaacgagcagggtttcatgtaggggagggcaacctgttcccagccctcgatttccaccggagcgtgcgaagtccagtcggcagcaacggcgacgccggtggaggcagccgcgggcacggcaatgccggttcctcttgccccttacccaacccctcctgtgcccttcacaccacccgctcccaatgcaggggctcaaagccaacttgtctgctctgggtgccggaatctgctcatgtatcctgccggcgcaacgtcggtctgctgcgcagtttgcagtaccgtgaccgctgttccggctcccgggactgaaatggcgcagctagtttgcggaggatgccacactcttctcatgtacatacgcggcgc

SEQ ID NO: 257 - protein, 81 aa, Triticum aestivum
  misc_feature: Ceres CLONE ID no.1052130
  misc_feature: Bit score of 113.9 for HMM based on sequences of FIGURE 14.
  misc_feature (30)..(54): Pfam Name: zf-LSD1 Pfam Description: LSD1 zinc finger
  misc_feature: Functional Homolog Of Ceres SEEDLINE ID no. ME02927 at SEQ ID NO. 239
MPVPLAPYPTPPVPFTPPAPNAGAQSQLVCSGCRNLLMYPAGATSVCCAVCSTVTAVPAPGTEMAQLVCGGCHTLLMYIRG

SEQ ID NO: 258 - DNA, 555 bp, Glycine max
  misc_feature: Ceres CLONE ID no.518615
  misc_feature: Encodes the peptide sequence at SEQ ID NO. 259
  misc_feature (534)..(534): n is a, c, t, g, unknown, or other
aagatgatgaggaaacattggtagaagaaattgaagagagagagagagagagagagagagagagagagggttggattggttttcttcttccttttctctaaagagaatctaatctcaatcctcattacagatttcttcattcctctctcagtcttttctgttttccccctttgacatcctcgttttcgccgaaacaaaaacaactaagattttttgtttgttttgtttttcttctccttgttgttatttgactcggttgtctgaataggttgttgcagcagggtcgggagccacagctatgcagagccaagttgtgtgcaatggttgtaggagccttctgctttacccaagaggggcaaccaatgtttgttgtgcattgtgcaacacaattacctctgttcctccccctgggatggaaatgtctcaactttattgtggagggtgtaggacattgctaatgtacacacgtggagctacaagtgtgagatgttcctgctgtcacactgtaaaccttgttccaccagcatctaatcnagtagctcatgtccattgtgg

SEQ ID NO: 259 - protein, 85 aa, Glycine max
  misc_feature: Ceres CLONE ID no.518615
  misc_feature: Bit score of 71.9 for HMM based on sequences of FIGURE 14.
  misc_feature (46)..(70): Pfam Name: zf-LSD1 Pfam Description: LSD1 zinc finger
  misc_feature: Functional Homolog Of Ceres SEEDLINE ID no. ME02927 at SEQ ID NO. 239
  misc_feature (79)..(79): Xaa is any aa, unknown, or other
MQSQVVCNGCRSLLLYPRGATNVCCALCNTITSVPPPGMEMSQLYCGGCRTLLMYTRGATSVRCSCCHTVNLVPPASNXVAHVHC

SEQ ID NO: 260 - DNA, 509 bp, Glycine max
  misc_feature: Ceres CLONE ID no.1069264
  misc_feature: Encodes the peptide sequence at SEQ ID NO. 261
gacgacgacgctaccactctccttccttcctttccttcaccgcgtctcctcccagacaaaatcccatccggaatcaacttctctccctccgatcctcttcctcccccttccccgccgcctccgccggcgagaatcgccgccgcgtccgtcgccacgacctaggagccctccttcacgggcggacctcttcccggagccaccggagggcggggacgggcggccagtctcgtccagagccggtatgcagagccagatcgtgtgccaccgctgccggagggtgctggcctacccgtcaggggcgcccagcgtgtgctgcgccatgtgccgagccatcaccgccgtgccacccccagcgccagcagtggaaatggctcagcttatatgtggtggttgccgaactttgctgatgtacacccgtaatgcagacactgtgagatgctcatgttgcagtactgtcaatcttgtcagaccagtcaataatatagcccacgtgaactgtggtcggtgcc

SEQ ID NO: 261 - protein, 89 aa, Glycine max
  misc_feature: Ceres CLONE ID no.1069264
  misc_feature: Bit score of 56.8 for HMM based on sequences of FIGURE 14.
  misc_feature (48)..(72): Pfam Name: zf-LSD1 Pfam Description: LSD1 zinc finger
  misc_feature: Functional Homolog Of Ceres SEEDLINE ID no. ME02927 at SEQ ID NO. 239
MQSQIVCHRCRRVLAYPSGAPSVCCAMCRAITAVPPPAPAVEMAQLICGGCRTLLMYTRNADTVRCSCCSTVNLVRPVNNIAHVNCGRC

SEQ ID NO: 262 - protein, 84 aa, Gossypium hirsutum
  misc_feature: CERES CLONE ID no.100068940
  misc_feature: Bit score of 60.2 for HMM based on sequences of FIGURE 14.
  misc_feature (43)..(67): Pfam Name: zf-LSD1 Pfam Description: LSD1 zinc finger
  misc_feature: Functional Homolog Of Ceres SEEDLINE ID no. ME02927 at SEQ ID NO. 239
  misc_feature (82)..(82): Xaa is any aa, unknown, or other
  misc_feature (84)..(84): Xaa is any aa, unknown, or other
MQSQLICTGCRSILLYPRGATSVCCALCNTITPPGMEMAQLICGGCRTLLMYTRGAASIRCSCCHTINVAPDGQCKGSPSRXQX

SEQ ID NO: 263 - DNA, 952 bp, Zea mays
  misc_feature: Ceres CLONE ID no.501403
  misc_feature: Encodes the peptide sequence at SEQ ID NO. 264
gcacgagacccgtccttgaggggcacgtcctagatcggtggcgcctgcctctcgccgccgatacggtgcctctcgcggtctcgctccccctcgcaggtcttttggtttttttagttcctccctttgcttcttggaggtgtttgttgccgtctcacccgcagttcttgagcaatggagatggctcgacttatatgtggtggctgccagacattattgatgtatgctcgcagtgcaacaactgtaagatgctcatgttgtgacacagtcaatcttgtcagaccagtgagtagcatagctcatgtgaactgtggccagtgccaaacagtgttgatgtatccatacggagcaccgtctgtcaaatgtgctgtttgcaacttcattacaaatgttggcggggtgactcccatgatacctttgccaccaccagcactaactgcatcaagtggaacttcatatatcatcccgtcaatttccgtgccgacgaatcaaccgcggaatgtaactgttgtcgttgaaaacccaatgacagtagatgacaagggaaaattggtgagcaatgttgtagtaggggttacgagcggcgggaaaaagtgacggcatatcacaacccgtatagctttgtccaaactatctaaaaagggtttaagaatacataccttgtatcatactgctgtttggcgatcggctgcgacggaggaatccccctccctggagagcgtagtggcaaggcagcgctgctttcgccactgcgatcgtgctagaacgagccaaaaaaaaaacgaagtgcgggtgtgcatactcagagtatatctgtagcttgttaccccttgattcttttgtatgtaatatgggctctgcctgactttcactgtgtgatcaaatttccaagcccgtggcgctgttgctgcgtgccttgttattagtgaataacaaacattgcaaatggctctgg

SEQ ID NO: 264 - protein, 140 aa, Zea mays
  misc_feature: Ceres CLONE ID no.501403
  misc_feature: Bit score of 55.4 for HMM based on sequences of FIGURE 14.
  misc_feature (46)..(70): Pfam Name: zf-LSD1 Pfam Description: LSD1 zinc finger
  misc_feature: Functional Homolog Of Ceres SEEDLINE ID no. ME02927 at SEQ ID NO. 239
MEMARLICGGCQTLLMYARSATTVRCSCCDTVNLVRPVSSIAHVNCGQCQTVLMYPYGAPSVKCAVCNFITNVGGVTPMIPLPPPALTASSGTSYIIPSISVPTNQPRNVTVVVENPMTVDDKGKLVSNVVVGVTSGGKK

SEQ ID NO: 265 - DNA, 695 bp, Glycine max
  misc_feature: Ceres CLONE ID no.646446
  misc_feature: Encodes the peptide sequence at SEQ ID NO. 266
aaaccgatcaatacccatcaatttgcatctagaatatttgataaacccgaaccatgactggtagcttcatttcatggctccaaaataaaaagtgaagggtgggaaagggggaggttgtggaacttagcagcgaagcgaggaagatgcaaagtcaacaaacagtgaaagaagaagatgatgaaggtccacctccgggatggcaacctctccccgctcagccaccgccaccgccacgtccatccggttgggctcaaatggtttgcggttcttgtcgtcgcctgctttcatatccacgaggtgccaaacatgtcaaatgttcatgctgtcagactgtcaacattgtattagaagctgatcaggttgggcaagttaagtgtggcagttgtgcggtattgctgatgtacccatatggtgcttcacaagttagatgttcatcatgccgatttgtgacagaaattggggcacacaacaagcggcctccatggtctgtacaacaaaggaagccatctcctccaaaaactggttgttagtggcctgtccgttggcctagtaaatggatcatccttgtacatcaaacaaattaggtatgaggattcatgtaccaatctcaaaattgctttgttattgagatacgcatccttaaggaattatttattaatgtaaagttttggaatttcaccagaatttttaagatg

SEQ ID NO: 266 - protein, 128 aa, Glycine max
  misc_feature: Ceres CLONE ID no.646446
  misc_feature: Bit score of 53.9 for HMM based on sequences of FIGURE 14.
  misc_feature (40)..(64): Pfam Name: zf-LSD1 Pfam Description: LSD1 zinc finger
  misc_feature: Functional Homolog Of Ceres SEEDLINE ID no. ME02927 at SEQ ID NO. 239
MQSQQTVKEEDDEGPPPGWQPLPAQPPPPPRPSGWAQMVCGSCRRLLSYPRGAKHVKCSCCQTVNIVLEADQVGQVKCGSCAVLLMYPYGASQVRCSSCRFVTEIGAHNKRPPWSVQQRKPSPPKTGC

SEQ ID NO: 267 - DNA, 730 bp, Arabidopsis thaliana
  misc_feature (1)..(730): Deletion of Ceres Promoter YP0286
  misc_feature (1)..(730): Ceres Promoter YP2219
attatttatttatttttaataaagaagcgattggtgttttcatagaaatcatgatagattgataggtatttcagttccacaaatctagatctgtgtgctatacatgcatgtattaattttttccccttaaatcatttcagttgataatattgctctttgttccaactttagaaaaggtatgaaccaacctgacgattaacaagtaaacattaattaatctttatatatatgagataaaaccgaggatatatatgattgtgttgctgtctattgatgatgtgtcgatattatgcttgttgtaccaatgctcgagccgagcgtgatcgatgccttgacaaactatatatgtttcccgaattaattaagttttgtatcttaattagaataacatttttatacaatgtaatttctcaagcagacaagatatgtatcctatattaattactatatatgaattgccgggcacctaccaggatgtttcaaatacgagagcccattagtttccacgtaaatcacaatgacgcgacaaaatctagaatcgtgtcaaaactctatcaatacaataatatatatttcaagggcaatttcgacttctcctcaactcaatgattcaacgccatgaatctctatataaaggctacaacaccacaaaggatcatcagtcatcacaaccacattaactcttcaccactatctctcaatctctcgtttcatttcttgacgcgtgaaa

SEQ ID NO: 268 - DNA, 1000 bp, Arabidopsis thaliana
  misc_feature (1)..(1000): Ceres Promoter YP0286
gaaaacaatcataggttacgctattatcatcgaaaggtatgtgatgcatattcccattgaaccagatttccatatattttatttgtaaagtgataatgaatcacaagatgattcaatattaaaaatgggtaactcactttgacgtgtagtacgtggaagaatagttagctatcacgcatatatatatctatgattaagtgtgtatgacataagaaactaaaatatttacctaaagtccagttactcatactgattttatgcatatatgtattatttatttatttttaataaagaagcgattggtgttttcatagaaatcatgatagattgataggtatttcagttccacaaatctagatctgtgtgctatacatgcatgtattaattttttccccttaaatcatttcagttgataatattgctctttgttccaactttagaaaaggtatgaaccaacctgacgattaacaagtaaacattaattaatctttatatatatgagataaaaccgaggatatatatgattgtgttgctgtctattgatgatgtgtcgatattatgcttgttgtaccaatgctcgagccgagcgtgatcgatgccttgacaaactatatatgtttcccgaattaattaagttttgtatcttaattagaataacatttttatacaatgtaatttctcaagcagacaagatatgtatcctatattaattactatatatgaattgccgggcacctaccaggatgtttcaaatacgagagcccattagtttccacgtaaatcacaatgacgcgacaaaatctagaatcgtgtcaaaactctatcaatacaataatatatatttcaagggcaatttcgacttctcctcaactcaatgattcaacgccatgaatctctatataaaggctacaacaccacaaaggatcatcagtcatcacaaccacattaactcttcaccactatctctcaatctctcgtttcatttcttgacgcgtgaaaa

SEQ ID NO: 269 - DNA, 565 bp, Arabidopsis thaliana
  misc_feature: Ceres CLONE ID no.1008476
  misc_feature: Encodes the peptide sequence at SEQ ID NO. 270
atggaagagatacaacaacaaacgcagaaggaagaacaaaagcaccgtgaagaagaagaggaggaagaggaaggtccgcctccgggatgggaatctgcagttyttcctcctccaatygtcaccatcaccgccgccgtaaaccccaatcccaccaccgtagaaattcccgaaaaggcccaaatggtatgtggatcttgcaggcgtttgctttcttatctaagaggatccaaacatgttaagtgctcctcttgtcagactgttaatctcgttcttgaagctaaccaggttggtcaggtgaattgcaacaattgcaaactgctactgatgtatccttatggagctccagctgttagatgttcctcctgcaattctgtcacagatatcagtgaaaacaacaaacgacctccatggtytgagcagcaaggaccactcaaaagtttaagcagtctcaggagagcagagaattaaacttgaaccgatttttgtcaattttgaaccggtttgacgactaaaaaccttgtaataatgtcgaaggatagatkaaataaaatcmccmttaataatc

SEQ ID NO: 270 - protein, 155 aa, Arabidopsis thaliana
  misc_feature: Ceres CLONE ID no.1008476
  misc_feature: Bit score of 66.2 for HMM based on sequences of FIGURE 14.
  misc_feature (101)..(125): Pfam Name: zf-LSD1 Pfam Description: LSD1 zinc finger
  misc_feature: Functional Homolog Of Ceres SEEDLINE ID no. ME02927 at SEQ ID NO. 239
  misc_feature (35)..(35): Xaa is any aa, unknown, or other
  misc_feature (39)..(39): Xaa is any aa, unknown, or other
  misc_feature (138)..(138): Xaa is any aa, unknown, or other
MEEIQQQTQKEEQKHREEEEEEEEGPPPGWESAVXPPPXVTITAAVNPNPTTVEIPEKAQMVCGSCRRLLSYLRGSKHVKCSSCQTVNLVLEANQVGQVNCNNCKLLLMYPYGAPAVRCSSCNSVTDISENNKRPPWXEQQGPLKSLSSLRRAEN

SEQ ID NO: 271 - protein, 155 aa, Arabidopsis thaliana
  misc_feature: Public GI ID no.15234540
  misc_feature: Bit score of 64.7 for HMM based on sequences of FIGURE 14.
  misc_feature (101)..(125): Pfam Name: zf-LSD1 Pfam Description: LSD1 zinc finger
  misc_feature: Functional Homolog Of Ceres SEEDLINE ID no. ME02927 at SEQ ID NO. 239
MEEIQQQTQKEEQKHREEEEEEEEGPPPGWESAVLPPPIVTITAAVNPNPTTVEIPEKAQMVCGSCRRLLSYLRGSKHVKCSSCQTVNLVLEANQVGQVNCNNCKLLLMYPYGAPAVRCSSCNSVTDISENNKRPPWSEQQGPLKSLSSLRRAEN

SEQ ID NO: 272 - protein, 163 aa, Oryza sativa subsp. japonica
  misc_feature: Public GI ID no.40809631
  misc_feature: Bit score of 66.8 for HMM based on sequences of FIGURE 14.
  misc_feature (111)..(135): Pfam Name: zf-LSD1 Pfam Description: LSD1 zinc finger
  misc_feature: Functional Homolog Of Ceres SEEDLINE ID no. ME02927 at SEQ ID NO. 239
MSQLPLASQATTTDLVSTTAMQPQSEGIVDESLQPQHPPSSTAHDSPCLQDSVPLVPPPPSPYLNKEVGQMVCGSCRILLAYFRGAGYVHCTCCQTMNYVLEAHEVGKVHCGHCATLLMYPFGAPAVKCSLCLFVTEIGERNVRRRLSIEQPTRTNSSGLAEA

SEQ ID NO: 273 - protein, 155 aa, Brassica rapa
  misc_feature: Public GI ID no.62751057
  misc_feature: Bit score of 410.1 for HMM based on sequences of FIGURE 14.
  misc_feature (77)..(101): Pfam Name: zf-LSD1 Pfam Description: LSD1 zinc finger
  misc_feature: Functional Homolog Of Ceres SEEDLINE ID no. ME02927 at SEQ ID NO. 239
MPVPLAPYPTPPATPLAPAYTPPSPANGSTGGQSQLVCSGCRNLLMYPVGATSVCCAVCNAVTAVPPPGTEMAQLVCGGCHTLLMYIRGATSVQCSCCHTVNLALEANQVAHVNCGSCKMLLMYQYGARSVKCAVCSFITSVGGSTSTTDQKLNN

SEQ ID NO: 274 - DNA, 884 bp, Gossypium hirsutum
  misc_feature: Ceres CLONE ID no.1839135
  misc_feature: Encodes the peptide sequence at SEQ ID NO. 275
acccccatcgtttcccttgtgtctcacagttgaactgtatgggagaaagcttgatgctctctggttctagacagtgaactattgaaaggagagtttagctctgtctgattttacaatgccagttccccttgcgccatatcccacacctccagcaccctacactcctcctgctgccaatggtgctcaaagccaacttgtgtgttccggttgtcgaaatttattgctctatccagttggagcaacctctgtgtgttgtgctgtttgcaatgcagtaacagcagtgccgcctcccggcacagaaatggcacagttggtttgcggaggctgtcataccttattaatgtacatccgcggagcaacaagcgttcaatgttcgtgttgtcacactgtcaatctggccttggaagcaaatcaggtggcacatgtaaattgtgggaactgcaggatgttactaatgtaccagtatggagcgagatccgtaaaatgtgcagtttgcaattttgtgacatcagttgggggctcagctagtgctgctgaacagaagttcaacagctgagactatattagaccccaagtcaaatattaaaagcaacaagtttgctttgcacgttataaatatcttccaccgaggttgcgtcccatcggcaaatggaggaaactcctcctcctcgcattgtattgagttatttttccttgcgtgacatatgaaataagcggttttgggtagctggttggatgcattataagtaattccatcagagaagacgttttttaacagtttgaacaatcggttatcttccgagtccagataagataaactttgttttcttttgatttgctatgaatatgagtggcaataaatacagggcataaagttcatctct

SEQ ID NO: 275 - protein, 146 aa, Gossypium hirsutum
  misc_feature: Ceres CLONE ID no.1839135
  misc_feature: Bit score of 413.1 for HMM based on sequences of FIGURE 14.
  misc_feature (106)..(130): Pfam Name: zf-LSD1 Pfam Description: LSD1 zinc finger
  misc_feature: Functional Homolog Of Ceres SEEDLINE ID no. ME02927 at SEQ ID NO. 239
MPVPLAPYPTPPAPYTPPAANGAQSQLVCSGCRNLLLYPVGATSVCCAVCNAVTAVPPPGTEMAQLVCGGCHTLLMYIRGATSVQCSCCHTVNLALEANQVAHVNCGNCRMLLMYQYGARSVKCAVCNFVTSVGGSASAAEQKFNS

SEQ ID NO: 276 - DNA, 1000 bp, Arabidopsis thaliana
  misc_feature (1)..(1000): Ceres Promoter YP0337
taatttttttatttttggaactaacacttattagtttaggtttccatcacctatttaattcgtaattcttatacatgcatataatagagatacatatatacaaatttatgatcatttttgcacaacatgtgatctcattcattagtatgcattatgcgaaaacctcgacgcgcaaaagacacgtaatagctaataatgttactcatttataatgattgaagcaagacgaaaacaacaacatatatatcaaattgtaaactagatatttcttaaaagtgaaaaaaaacaaagaaatataaaggacaattttgagtcagtctcttaatattaaaacatatatacataaataagcacaaacgtggttacctgtcttcatgcaatgtggactttagtttatctaatcaaaatcaaaataaaaggtgtaatagttctcgtcatttttcaaattttaaaaatcagaaccaagtgatttttgtttgagtattgatccattgtttaaacaatttaacacagtatatacgtctcttgagatgttgacatgatgataaaatacgagatcgtctcttggttttcgaattttgaactttaatagtttttttttttagggaaactttaatagttgtttatcataagattagtcacctaatggttacgttgcagtaccgaaccaattttttacccttttttctaaatgtggtcgtggcataatttccaaaagagatccaaaacccggtttgctcaactgataagccggtcggttctggtttgaaaaacaagaaataatctgaaagtgtgaaacagcaacgtgtctcggtgtttcatgagccacctgccacctcattcacgtcggtcattttgtcgtttcacggttcacgctctagacacgtgctctgtccccaccatgactttcgctgccgactcgcttcgctttgcaaactcaaacatgtgtgtatatgtaagtttcatcctaataagcatctcttaccacattaatttaaaa

SEQ ID NO: 277 - DNA, 1000 bp, Arabidopsis thaliana
  misc_feature (1)..(1000): Ceres Promoter YP0381
cacggtcaaagtattgctaacatggtcattacattgaaaaagaaaattaattgtctttactcatgtttattctatacaaataaaaatattaaccaaccatcgcactaacaaaatagaaatcttattctaatcacttaattgttgacaattaaatcattgaaaaatacacttaaatgtcaaatattcgttttgcatacttttcaatttaaatacatttaaagttcgacaagttgcgtttactatcatagaaaactaaatctcctaccaaagcgaaatgaaactactaaagcgacaggcaggttacataacctaacaaatctccacgtgtcaattaccaagagaaaaaaagagaagataagcggaacacgtggtagcacaaaaaagataatgtgatttaaattaaaaaacaaaaacaaagacacgtgacgacctgacgctgcaacatcccaccttacaacgtaataaccactgaacataagacacgtgtacgatcttgtctttgttttctcgatgaaaaccacgtgggtgctcaaagtccttgggtcagagtcttccatgattccacgtgtcgttaatgcaccaaacaagggtactttcggtattttggcttccgcaaattagacaaaacagctttttgtttgattgatttttctcttctctttttccatctaaattctctttgggctcttaatttctttttgagtgttcgttcgagatttgtcggagattttttcggtaaatgttgaaattttgtgggatttttttttatttctttattaaacttttttttattgaatttataaaaagggaaggtcgtcattaatcgaagaaatggaatcttccaaaatttgatattttgctgttttcttgggatttgaattgctctttatcatcaagaatctgttaaaatttctaatctaaaatctaagttgagaaaaagagagatctctaatttaaccggaattaatattctccgaccgaagttattatgttgcaggct

SEQ ID NO: 278 - DNA, 375 bp, Glycine max
  misc_feature: Ceres CLONE ID no.1371813
  misc_feature: Encodes the peptide sequence at SEQ ID NO. 279
atcttagagtgagtttcgaagagcagtagaaagaaactagaatggccactttagacgaacgcccttctgcgaaaaggtggcttcctcttgaagctaaccctgaagtcatgaaccagttcctttggggtcttggccttccactggacgaggcagagtgctgtgatgtgtttggcttagatgaagagcttctggaaatggttccgaagcccgtcctcgccgtgctttttctttatccaattaccgcaaagtccgaagaagaaaggttgcaacaggaaaacgaaaaaaaggattatagcagcaaagtgtattttatgaagcaaaccgtgggtaatgcttgtggtacaatagggttttcatgcacttgggaacataacc

SEQ ID NO: 279 - protein, 145 aa, Glycine max
  misc_feature: Ceres CLONE ID no.1371813
  misc_feature: Bit score of 403.5 for HMM based on sequences of FIGURE 14.
  misc_feature (67)..(91): Pfam Name: zf-LSD1 Pfam Description: LSD1 zinc finger
  misc_feature: Functional Homolog Of Ceres SEEDLINE ID no. ME02927 at SEQ ID NO. 239
MPVPLAPYPTPPAPYTPPANGVQSQLVCSGCRNLLVFPVGATSVCCAVCNAVTAVPPPGTEMAQLVCGGCHTLLMYIRGATSVQCSCCHTVNLALEANQVAHVNCGNCRMLLAYQYGARSVKCAVCNFVTSVGATASTTEQKFST

SEQ ID NO: 280 - DNA, 875 bp, Gossypium hirsutum
  misc_feature: Ceres CLONE ID no.1914866
  misc_feature: Encodes the peptide sequence at SEQ ID NO. 281
gtaaggcttcaaataaatttctttggttatcaagtgctctcaagctttctatttttgtttgcatacatccattttatcatcatcttaatgggagaaggattggtgctatctgttttgaaggcagtgaactattaggatcctccaaaagagagtttaccctctgcctgattttacaatgccagttcctcttgctccatatccaacaccttcagggtcatatactcctcctgcgaatggggctcaaagccagcttgtatgttctggatgccgaaatctattaatgtatccagctggagcaacctctgtgtgttgtgctgtttgcaatgcaataacagctgtgccacctcctggaacagaaatggcccagttagtttgtggaggctgccataccttattgatgtacattcgtggagccacaagtgttcaatgttcatgctgtcacactgtcaatttggccttggaagcaaatcaggtggcacatgtaaattgtgggaactgcaggatgctactaatgtaccagtatggagcaagatctgtaaaatgtgcagtttgcaattttgtcacatcagttgggggatcagcaagtggtgcagcagaacagaagttcaacaacacctaaatttaacttcacagttgagattaaaattctagtttacaactttggttttgcatattacaaatatcctcttctattgcacccctcagcaacatagaggaaatcaaatccttgcattgtatagagttgttctttcttttccttttttgcttgcgtggccaattactgaataagcagtttgactttttgttttttgtttttagagttgtttttagagttgaacaatcatttatcatatgataagataaacttcattttc

SEQ ID NO: 281 - protein, 147 aa, Gossypium hirsutum
  misc_feature: Ceres CLONE ID no.1914866
  misc_feature: Bit score of 394.8 for HMM based on sequences of FIGURE 14.
  misc_feature (105)..(129): Pfam Name: zf-LSD1 Pfam Description: LSD1 zinc finger
  misc_feature: Functional Homolog Of Ceres SEEDLINE ID no. ME02927 at SEQ ID NO. 239
MPVPLAPYPTPSGSYTPPANGAQSQLVCSGCRNLLMYPAGATSVCCAVCNAITAVPPPGTEMAQLVCGGCHTLLMYIRGATSVQCSCCHTVNLALEANQVAHVNCGNCRMLLMYQYGARSVKCAVCNFVTSVGGSASGAAEQKFNNT

SEQ ID NO: 282 - protein, 187 aa, Arabidopsis thaliana
  misc_feature: Public GI ID no.42570227
  misc_feature: Bit score of 344.9 for HMM based on sequences of FIGURE 14.
  misc_feature (147)..(171): Pfam Name: zf-LSD1 Pfam Description: LSD1 zinc finger
  misc_feature: Functional Homolog Of Ceres SEEDLINE ID no. ME02927 at SEQ ID NO. 239
MHTWKNQIFSDSQFVLLFMGKNCSIIFPEPHLFISHVFIIHLNVLFLVKKINKNNLRFVGSTSGQSQLVCSGCRNLLMYPVGATSVCCAVCNAVTAVPPPGTEMAQLVCGGCHTLLMYIRGATSVQCSCCHTVNLALEANQVAHVNCGNCMMLLMYQYGARSVKCAVCNFVTSVGGSTSTTDSKFNN

SEQ ID NO: 283 - DNA, 471 bp, Populus balsamifera subsp. trichocarpa
  misc_feature: Ceres ANNOT ID no.1485466
  misc_feature: Encodes the peptide sequence at SEQ ID NO. 284
atgccagttcctcttgcaccttatccaacacctccagccccatatgctcctcctgctccagctccagctcctcctcctcctcctccagccaacggtgcacagagccagctcgtgtgttctggatgtcgaaacctgttactctatccagttggagcaacctctgtatgttgtgctgtttgcaatgcagtcacagctgtgccacctcctggcacagaaatggcccagttggtttgcggaggttgccacaccttactgatgtacatccgtggagcaacgagcgtgcagtgttcttgttgtcatacagtcaatctagccttggaggcaaatcaagtggcacacgtcaattgtgggagctgcaggatgctgttgatgtaccgatatggagcacggtctgtgaaatgtgctgtttgcaattttgtcacaccagttggggtctcatcaagcgttaatgaacgcaagttcaatacctga

SEQ ID NO: 284 - protein, 156 aa, Populus balsamifera subsp. trichocarpa
  misc_feature: Ceres ANNOT ID no.1485466
  misc_feature: Bit score of 376.8 for HMM based on sequences of FIGURE 14.
  misc_feature (116)..(140): Pfam Name: zf-LSD1 Pfam Description: LSD1 zinc finger
  misc_feature: Functional Homolog Of Ceres SEEDLINE ID no. ME02927 at SEQ ID NO. 239
MPVPLAPYPTPPAPYAPPAPAPAPPPPPPANGAQSQLVCSGCRNLLLYPVGATSVCCAVCNAVTAVPPPGTEMAQLVCGGCHTLLMYIRGATSVQCSCCHTVNLALEANQVAHVNCGSCRMLLMYRYGARSVKCAVCNFVTPVGVSSSVNERKFNT

SEQ ID NO: 285 - DNA, 708 bp, Gossypium hirsutum
  misc_feature: Ceres CLONE ID no.1939451
  misc_feature: Encodes the peptide sequence at SEQ ID NO. 286
atcttgtatggttctctaagaaagtttccaaattgggaaccaagtattttgttgttatacatacactcctttctcatcatttccctttctgtttcattgttaactgttataatcttcattatagtccattctgattccactttctgagtttttgcagttactaaatttcttgtttcttactttttctggacatggtaagaatgggagaaggattggtgctatctgttttgaaggcagtgaactattaggatcctccaaaagagagtttaccctctgcctgattttacaatgccagttcctcttgctccatatccaacaccttcagggtcatatactcctcctgcgaatggggctcaaagccagcttgtatgttctggatgccgaaatctattaatgtatccagctggagcaacctctgtgtgttgtgctgtttgcaatgcaataacagctgtgccacctcctggaacagaaatggcccagttagtttgtggaggctgccataccttattgatgtacattcgtggagccacaagtgttcaatgttcatgctgtcacactgtcaatttggccttggaagcaaatcaggtggcacatgtaaattgtgggaactgcaggatgctactaatgtaccagtatggagcaagatctgtaaaatgtgcagtttgcaattttgtcacatcagttgggggatcagcaagtggtgcagca

SEQ ID NO: 286 - protein, 140 aa, Gossypium hirsutum
  misc_feature: Ceres CLONE ID no.1939451
  misc_feature: Bit score of 370.5 for HMM based on sequences of FIGURE 14.
  misc_feature (105)..(129): Pfam Name: zf-LSD1 Pfam Description: LSD1 zinc finger
  misc_feature: Functional Homolog Of Ceres SEEDLINE ID no. ME02927 at SEQ ID NO. 239
MPVPLAPYPTPSGSYTPPANGAQSQLVCSGCRNLLMYPAGATSVCCAVCNAITAVPPPGTEMAQLVCGGCHTLLMYIRGATSVQCSCCHTVNLALEANQVAHVNCGNCRMLLMYQYGARSVKCAVCNFVTSVGGSASGAA

SEQ ID NO: 287 - DNA, 1107 bp, Glycine max
  misc_feature: Ceres CLONE ID no.530218
  misc_feature: Encodes the peptide sequence at SEQ ID NO. 288
ttttctctctctctctccccactttcatctgtaacaagttgtcaagggcgtgtgtttttgccccacttgggagttgggacactattctatttaatttaatttcacttctggtgagagggcctcaactcttctctacttctgtgctccaatttcctgttgcttcatgcatggctccctaagggaagaaagcttgtcatttgactcttattacgttatcctgtttgcaaatttatttgctctacaatctgcttcacaggtttctctctctgtttctgctggagttgttcaaatgggagaaagagttttattctctacgtagagtttggtagacaaagataatattttgagataatgctagttccacttgccccgtaccctccaccccctccaccagctccatatacgcctccaccaaatggtgcacagagtcaactagtctgttctgggtgtagaaaccttctgctctatccagttggagccacctctgtgtgctgtgctgtttgcaatgcagtcacaacagtgccacctcctggcacagaaatggcccagttagtttgtggaggctgtcacactttcctcatgtacatccgtggagccacaagtgtgcaatgctcttgctgtcacacggtcaatctagctttggaagcaaatctggtggcgcatgtcaactgtgggaactgtaagatgctactcaggtaccaatatggagcaagatccgtgaaatgtgccgtttgcagttttgtaacgtcagttggggcctcgacaagcaccactgagcagaaattcagcacctaaatcttactgtaaaattggtgacagacaccacgaccttggttttaatcaaatatcgcccttgaggaataacgagtgcatatgagatagctgaggaaattttcttaacatgtatagagctatttttcccttgagtgaaataattaaataaattttgtattattggtgtaccatgtaatgctttatttgtaagcagtgtaagcctctaaaggaaatgagtagtggagtttatagttctccaatttcaattgcagtgtgccaaaaagctatttggaataactatatatgataagattattgattctgagtgctttt

SEQ ID NO: 288 - protein, 147 aa, Glycine max
  misc_feature: Ceres CLONE ID no.530218
  misc_feature: Bit score of 374.4 for HMM based on sequences of FIGURE 14.
  misc_feature (69)..(93): Pfam Name: zf-LSD1 Pfam Description: LSD1 zinc finger
  misc_feature: Functional Homolog Of Ceres SEEDLINE ID no. ME02927 at SEQ ID NO. 239
MLVPLAPYPPPPPPAPYTPPPNGAQSQLVCSGCRNLLLYPVGATSVCCAVCNAVTTVPPPGTEMAQLVCGGCHTFLMYIRGATSVQCSCCHTVNLALEANLVAHVNCGNCKMLLRYQYGARSVKCAVCSFVTSVGASTSTTEQKFST

SEQ ID NO: 289 - DNA, 844 bp, Glycine max
  misc_feature: Ceres CLONE ID no.562250
  misc_feature: Encodes the peptide sequence at SEQ ID NO. 290
acttaactcttatagtctttcttattccttctggaatccttccctttagtttcatgcgcaaggggaagaagcaattcatttgactcttactttattatttgatttgccggcaccctcttcttcacgggagctgaaaaaaaatgggagaaagtgctttgttctctgtgtagagtttggcagagaaagataacaacattttttagtcctttataatgccagttccacttgccccctacccaacaccgccagctccttatacaccaccagctaatggtgtacagagtcaacttgtctgttctgggtgtagaaaccttctagtgtttccagttggagccacctccgtgtgctgtgctgtttgcaatgctgtcacagcagtgccacctcctggcacagaaatggcccasttagtatgtggaggttgccatactttamtcatgtacatccggggcgcgacaagtgtgcaatgttcatgttgtcacactgtcaatctagctttggaagcaaatcaggtggcacatgtcaactgtgggaactgcaggatgctactggcgtaccaatatggagcaagatccgtgaaatgtgcagtttgcaattttgtaacatcagttggggccmcagcaagcmccmytgagcagaagttcagcacctwaaacatacaaaatagcaaggtcattatagactctacaaccttggttttgagttacatatcgcccttaaggaataaagaggttatcagattggaraggaaactcgtttcacgtgtatagagttatttttttgccytgsgtgattgtattaaattatatttttgttagattgggtgtatgaaaaaactattyatgac

SEQ ID NO: 290 - protein, 184 aa, Glycine max
  misc_feature: Ceres CLONE ID no.562250
  misc_feature: Bit score of 389.9 for HMM based on sequences of FIGURE 14.
  misc_feature (105)..(129): Pfam Name: zf-LSD1 Pfam Description: LSD1 zinc finger
  misc_feature: Functional Homolog Of Ceres SEEDLINE ID no. ME02927 at SEQ ID NO. 239
  misc_feature (64)..(64): Xaa is any aa, unknown, or other
  misc_feature (74)..(74): Xaa is any aa, unknown, or other
  misc_feature (135)..(135): Xaa is any aa, unknown, or other
  misc_feature (138)..(138): Xaa is any aa, unknown, or other
  misc_feature (139)..(139): Xaa is any aa, unknown, or other
  misc_feature (146)..(146): Xaa is any aa, unknown, or other
  misc_feature (177)..(177): Xaa is any aa, unknown, or other
MPVPLAPYPTPPAPYTPPANGVQSQLVCSGCRNLLVFPVGATSVCCAVCNAVTAVPPPGTEMAXLVCGGCHTLXMYIRGATSVQCSCCHTVNLALEANQVAHVNCGNCRMLLAYQYGARSVKCAVCNFVTSVGAXASXXEQKFSTXNIQNSKVIIDSTTLVLSYISPLRNKEVIRLXRKLVSRV

SEQ ID NO: 291 - protein, 143 aa, Oryza sativa subsp. japonica
  misc_feature: Public GI ID no.40809629
  misc_feature: Bit score of 397.5 for HMM based on sequences of FIGURE 14.
  misc_feature (104)..(128): Pfam Name: zf-LSD1 Pfam Description: LSD1 zinc finger
  misc_feature: Functional Homolog Of Ceres SEEDLINE ID no. ME02927 at SEQ ID NO. 239
MPVPLAPYPTPPVPFTPPNGAQSQLVCSGCRNLLMYPAGATSVCCAVCSTVTAVPAPGTEMAQLVCGGCHTLLMYIRGATSVQCSCCHTVNLAMEANQVAHVNCGNCRMLLMYQYGARSVKCAVCNFVTSVGASPGTDQKPSS

SEQ ID NO: 292 - protein, 184 aa, Oryza sativa subsp. japonica
  misc_feature: Public GI ID no.115474891
  misc_feature: Bit score of 397.5 for HMM based on sequences of FIGURE 14.
  misc_feature (145)..(169): Pfam Name: zf-LSD1 Pfam Description: LSD1 zinc finger
  misc_feature: Functional Homolog Of Ceres SEEDLINE ID no. ME02927 at SEQ ID NO. 239
MHLSAGFLSCRERKGDFSCLTAARICEASTSDAVVQAAGTAMPVPLAPYPTPPVPFTPPNGAQSQLVCSGCRNLLMYPAGATSVCCAVCSTVTAVPAPGTEMAQLVCGGCHTLLMYIRGATSVQCSCCHTVNLAMEANQVAHVNCGNCRMLLMYQYGARSVKCAVCNFVTSVGASPGTDQKPSS

SEQ ID NO: 293 - protein, 143 aa, Oryza sativa subsp. japonica
  misc_feature: Public GI ID no.42406064
  misc_feature: Bit score of 395.1 for HMM based on sequences of FIGURE 14.
  misc_feature (104)..(128): Pfam Name: zf-LSD1 Pfam Description: LSD1 zinc finger
  misc_feature: Functional Homolog Of Ceres SEEDLINE ID no. ME02927 at SEQ ID NO. 239
MPVPLAPYPTPPVPFTPPNGAQSQLVCSGCRNLLMYPAGATSVCCAVCSTVTAVPAPGTEMAQLVCGGCHTLLMYIRGATSVQCSCCHTVNLAMEANQVAHVNCGNCRMLLMYQYGARSVKCAVCNFVTSVGASPGIDQKPSS

SEQ ID NO: 294 - protein, 165 aa, Oryza sativa subsp. indica
  misc_feature: Public GI ID no.125560221
  misc_feature: Bit score of 376.1 for HMM based on sequences of FIGURE 14.
  misc_feature (104)..(128): Pfam Name: zf-LSD1 Pfam Description: LSD1 zinc finger
  misc_feature: Functional Homolog Of Ceres SEEDLINE ID no. ME02927 at SEQ ID NO. 239
MPVPLAPYPTPPVPFTPPNGAQSQLVCSGCRNLLMYPAGATSVCCAVCSTVTAVPAPGTEMAQLVCGGCHTLLMYIRGATSVQCSCCHTVNLAMEANQVAHVNCGNCRMLLMYQYGARSVKCAVCNFVTSVGEHWDPGDLYNLSDCHPKLMSAWQQLAVMACDAF

SEQ ID NO: 295 - protein, 165 aa, Oryza sativa subsp. japonica
  misc_feature: Public GI ID no.125602263
  misc_feature: Bit score of 377.3 for HMM based on sequences of FIGURE 14.
  misc_feature (104)..(128): Pfam Name: zf-LSD1 Pfam Description: LSD1 zinc finger
  misc_feature: Functional Homolog Of Ceres SEEDLINE ID no. ME02927 at SEQ ID NO. 239
MPVPLAPYPTPPVPFTPPNGAQSQLVCSGCRNLLMYPAGATSVCCAVCSTVTAVPAPGTEMAQLVCGGCHTLLMYIRGATSVQCSCCHTVNLAMEANQVAHVNCGNCRMLLMYQYGARSVKCAVCNFVTSVGEHWDPGDWYNLSDCHPKLMSAWQQLAVMACDAF

SEQ ID NO: 296 - DNA, 484 bp, Panicum virgatum
  misc_feature: Ceres CLONE ID no.1720386
  misc_feature: Encodes the peptide sequence at SEQ ID NO. 297
tgtgctaacccatgaactgctcttatgcatgcgacagccataagcattgctattagggcaaagcagccagtttccgacgcctgatagccgccggaatctgcgagatctccacgagcagcgtcgtcggataaggcagccggcacggcaatgccggttccccttgccccgtatccaactcctccggtgccattcacaccccccaatggggcccaaagccagcttgtatgcaccgggtgccggaatcttctcatgtatccagctgatgcaacgtccgtctgctgtgcagtttgcagcaccgtcaccgccgtgccggctccgggaactgagatggcacagttagtttgcggaggatgccacactctcctgatgtacatacgtggcgcgacaagtgtacaatgttcttgctgccacactgttaacctggctatggaagcgaatcaggtcgcccatgtaaattgcgggaactgccgtatgctgcttatgt

SEQ ID NO: 297 - protein, 143 aa, Panicum virgatum
  misc_feature: Ceres CLONE ID no.1720386
  misc_feature: Bit score of 394.6 for HMM based on sequences of FIGURE 14.
  misc_feature (104)..(128): Pfam Name: zf-LSD1 Pfam Description: LSD1 zinc finger
  misc_feature: Functional Homolog Of Ceres SEEDLINE ID no. ME02927 at SEQ ID NO. 239
MPVPLAPYPTPPVPFTPPNGAQSQLVCTGCRNLLMYPADATSVCCAVCSTVTAVPAPGTEMAQLVCGGCHTLLMYIRGATSVQCSCCHTVNLAMEANQVAHVNCGNCRMLLMYQYGARSVKCAVCNFVTSVGASPGAEQKPSS

SEQ ID NO: 298 - DNA, 1451 bp, Zea mays
  misc_feature: Ceres CLONE ID no.391080
  misc_feature: Encodes the peptide sequence at SEQ ID NO. 299
gattggctgggaactacatcttggaattccttttttttctctctctcactcgatttctttgtttgattattggccatggtgggtgattcctcgcctgttttatctcgaaactggattagctgcgagtttttttttcttctttcaacccgctgcgttattctaagctcggtctactcgttgcatcaggccaacaatggcaagtggcttccatgaacatggctgtccatgaaaaatcccccgtatgcatgctcggtctaatctcctcaagctagcgaaacgaaatttcctaaaagccggtctggtcctcgaatacagcttgttgcctgagccgctgggagtcctatggagtagtagagttcttcaccttcttctgcgcgcgattactgttagccggcttgaggagaagctggaacgatcttgacgtgcattcagagaatcgatttttccccgtctcccaaggactcctcgtccattagtaatcgattttactgctactgaacagctctttgcgtgcattttctccgagatttctgtggatttcaaatttcaatgcaactgaagccactctgtctctctccctcgctctgtttcgtcagcgtctcctgcacgtgctgtgtcgtttccagggtttcatgcggggcgaagcagctggtctctgccgcctgaacgccgccggaatctgcgaggcctccccgagctgcgtgcgtcgtcggataaggcagccggcacggcaatgccggttccgcttgctccgtacccagctcctccggcgccattcacgccgcccaatggggcccagagccagctcgtctgcaccgggtgccggaacctcctcatgtacccagctggtgcgacgtcggtctgctgcgccgtctgcagcaccgtcaccgccgtgccggctccaggaactgagatggcgcagctagtgtgcggaggatgccacaccctcctcatgtacatacgcggcgcgacgagcgtgcagtgttcttgctgccacactgtgaacctggctatggaagcaaatcaagtcgcgcatgtgaactgcgggaactgccgcatgctgctcatgtaccagtacggggctcggtccgtgaagtgcgcggtctgcagttttgtgacatcggttggaacctcacctggtgcagagcagaagcccagcagctgagctgatagtgtccctgaaattgctgtgagaccacctatgaaaaggatgctttgagtgcacatgtatagagttcttccctgaagcgattctttcactttcttttcttttgttttcttttttggttcctcctcaccatctccaccccacccgtccacttctgcgttccttcgatggatctggcgagcccgcggaataaatgagagttttggatatatagctagggcttaacctcgtcgacttgtctgtaaaatcgaatgagacatatatataaacctatgttgttttc

SEQ ID NO: 299 - protein, 143 aa, Zea mays
  misc_feature: Ceres CLONE ID no.391080
  misc_feature: Bit score of 392.0 for HMM based on sequences of FIGURE 14.
  misc_feature (104)..(128): Pfam Name: zf-LSD1 Pfam Description: LSD1 zinc finger
  misc_feature: Functional Homolog Of Ceres SEEDLINE ID no. ME02927 at SEQ ID NO. 239
MPVPLAPYPAPPAPFTPPNGAQSQLVCTGCRNLLMYPAGATSVCCAVCSTVTAVPAPGTEMAQLVCGGCHTLLMYIRGATSVQCSCCHTVNLAMEANQVAHVNCGNCRMLLMYQYGARSVKCAVCSFVTSVGTSPGAEQKPSS

SEQ ID NO: 300 - DNA, 695 bp, Panicum virgatum
  misc_feature: Ceres CLONE ID no.1950743
  misc_feature: Encodes the peptide sequence at SEQ ID NO. 301
gtcagcctctctatactacatagagagagagagagagagagatgtgctaacccatgaactgctcttatgcatgcgacagccataagcattgctattagggcaaagcagccagtttccgacgcctgatagccgccggaatctgcgagatctccacgagcagcgtcgtcggataaggcagccggcacggcaatgccggttccccttgccccgtatccaactcctccggtgccattcacaccccccaatggggcccaaagccagcttgtatgcaccgggtgccggaatcttctcatgtatccagctgatgcaacgtccgtctgctgtgcagtttgcagcaccgtcaccgccgtgccggctccgggaactgagatggcacagttagtttgcggaggatgccacactctcctgatgtacatacgtggcgcgacaagtgtacaatgttcttgctgccacactgttaacctggctatggaaggtacgaatcaggtcgcccatgtaaattgcgggaactgccgtatgctgcttatgtaccagtatggcgctaggtctgtgaaatgtgcagtctgcaattttgtgacatcagttggggcctcacctggtgcagagcacaagcccagcagctgatgttcctgaaaatactgagatcacctatgaaggcagcttctgaataggatgctttgagtgcaaatgtatag

SEQ ID NO: 301 - protein, 144 aa, Panicum virgatum
  misc_feature: Ceres CLONE ID no.1950743
  misc_feature: Bit score of 382.4 for HMM based on sequences of FIGURE 14.
  misc_feature (105)..(129): Pfam Name: zf-LSD1 Pfam Description: LSD1 zinc finger
  misc_feature: Functional Homolog Of Ceres SEEDLINE ID no. ME02927 at SEQ ID NO. 239
MPVPLAPYPTPPVPFTPPNGAQSQLVCTGCRNLLMYPADATSVCCAVCSTVTAVPAPGTEMAQLVCGGCHTLLMYIRGATSVQCSCCHTVNLAMEGTNQVAHVNCGNCRMLLMYQYGARSVKCAVCNFVTSVGASPGAEHKPSS

SEQ ID NO: 302 - protein, 110 aa, Arabidopsis thaliana
  misc_feature: Public GI ID no.12322448
  misc_feature: Bit score of 200.3 for HMM based on sequences of FIGURE 14.
  misc_feature (76)..(100): Pfam Name: zf-LSD1 Pfam Description: LSD1 zinc finger
  misc_feature: Functional Homolog Of Ceres SEEDLINE ID no. ME02927 at SEQ ID NO. 239
MPVPLAPYPTPPAPALAPSYNTPPANGSTSGQSQLVCSGCRNLLMYPVGATSVCCAVCNAVTAVPPPGTEMAQLVCGGCHTLLMYIRGATSVQCSCCHTVNLALEGLHAY

SEQ ID NO: 303 - DNA, 684 bp, Panicum virgatum
  misc_feature: Ceres CLONE ID no.1962626
  misc_feature: Encodes the peptide sequence at SEQ ID NO. 304
  misc_feature (620)..(620): n is a, c, t, g, unknown, or other
  misc_feature (621)..(621): n is a, c, t, g, unknown, or other
  misc_feature (622)..(622): n is a, c, t, g, unknown, or other
tattaggtagctgtaaattcacatactgaagtgtcctttgtcctgcaattttcaggggcccaaagccagcttgtctgcaccgggtgccggaatcttctcatgtatccagctggtgcgacgtctgtctgctgtgcagtttgcagcaccgtcaccgccgtgccggctccaggaactgagatggcacagttagtttgcggaggatgccacactctcctgatgtacatacgtggggcgacaagtgtacaatgttcttgctgccacactgttaaccttgctatggaagcgaatcaagtcgcgcatgtaaattgcgggaactgccgtatgctgcttatgtaccagtatggtgctagatctgtgaaatgtgcagtctgcaattttgtgacatcagttggggcctcacctggtgcagagcagaagcccagcagctgatgttcctgaaaatactgagatcacatatgaaggcagcttctgaaaaggatgctttgagtgcacatgtatagagttcttccctgaagcaatttttccccctcctttatctctcttcttcccatccattctgcattccttcgatggacctggcgagcccgcggaatagagttttgagaaataactagtgctcnnnttcgtcgacttgtctgtaaaactgaatgagacatatacataaacctatggtgttttctgtgt

SEQ ID NO: 304 - protein, 109 aa, Panicum virgatum
  misc_feature: Ceres CLONE ID no.1962626
  misc_feature: Bit score of 249.6 for HMM based on sequences of FIGURE 14.
  misc_feature (70)..(94): Pfam Name: zf-LSD1 Pfam Description: LSD1 zinc finger
  misc_feature: Functional Homolog Of Ceres SEEDLINE ID no. ME02927 at SEQ ID NO. 239
MYPAGATSVCCAVCSTVTAVPAPGTEMAQLVCGGCHTLLMYIRGATSVQCSCCHTVNLAMEANQVAHVNCGNCRMLLMYQYGARSVKCAVCNFVTSVGASPGAEQKPSS

SEQ ID NO: 305 - DNA, 566 bp, Zea mays
  misc_feature: Ceres CLONE ID no.348573
  misc_feature: Encodes the peptide sequence at SEQ ID NO. 306
awtcaaaagcacgagacccgtccttgaggggcacgtcctagatcggtggcgcctgcctctcgccgccgatacggtgcctctcgcggtctcgctccccctcrcaggtcttttggtttttttagttcctccctttgcttcttggaggtgtttgttgccgtctcacccgcagttcttgagacatgcagagccagatagtgtgccacgggtgcaggacccttctgttctacccaagaggtgctccgagcgtgtgttgtgcggtatgccatgtggtcaccaatgtgccgcctccagcaatggagatggctcgacttatatgtggtggctgccagacattattgatgtatgctcgcagtgcaacaactgtaagatgctcatgttgtgacacagtcaatcttgtcagaccagtgagtagcatagctcatgtgaactgtggccagtgccaaacagtgttgatgtatccatacggagcaccgtctgtcaaatgtgctgtttgcaacttcattacaaatgttggcggggtgactcccatgatacctttgccaccaccagcactaactgcatcaagt

SEQ ID NO: 306 - protein, 129 aa, Zea mays
  misc_feature: Ceres CLONE ID no.348573
  misc_feature: Bit score of 174.4 for HMM based on sequences of FIGURE 14.
  misc_feature (84)..(108): Pfam Name: zf-LSD1 Pfam Description: LSD1 zinc finger
  misc_feature: Functional Homolog Of Ceres SEEDLINE ID no. ME02927 at SEQ ID NO. 239
MQSQIVCHGCRTLLFYPRGAPSVCCAVCHVVTNVPPPAMEMARLICGGCQTLLMYARSATTVRCSCCDTVNLVRPVSSIAHVNCGQCQTVLMYPYGAPSVKCAVCNFITNVGGVTPMIPLPPPALTASS

SEQ ID NO: 307 - DNA, 432 bp, Sorghum bicolor
  misc_feature: Ceres ANNOT ID no.6117859
  misc_feature: Encodes the peptide sequence at SEQ ID NO. 308
atgccggttccccttgccccgtatccgactcctccggtgccattcacgccgcctaatggggcccaaagccagcttgtctgcaccgggtgccggaatctcctcatgtatccagctggtgcgacgtctgtctgctgtgccgtttgcagcaccgtcactgccgtgccggctccaggaactgagatggcacagttagtttgtggaggatgccacactctcctgatgtacatacgtggtgcgactagtgtacaatgttcttgctgccacaccgttaacctggctatggaagcaaatcaagttgcgcatgtaaactgcgggaactgccgtatgctgctcatgtaccagtatggagctaggtctgtgaaatgcgcagtctgcaattttgtgacatcagttggggcctcacctggtgcagagcagaagcccagcagctga

SEQ ID NO: 308 - protein, 143 aa, Sorghum bicolor
  misc_feature: Ceres ANNOT ID no.6117859
  misc_feature: Bit score of 394.9 for HMM based on sequences of FIGURE 14.
  misc_feature (104)..(128): Pfam Name: zf-LSD1 Pfam Description: LSD1 zinc finger
  misc_feature: Functional Homolog Of Ceres SEEDLINE ID no. ME02927 at SEQ ID NO. 239
MPVPLAPYPTPPVPFTPPNGAQSQLVCTGCRNLLMYPAGATSVCCAVCSTVTAVPAPGTEMAQLVCGGCHTLLMYIRGATSVQCSCCHTVNLAMEANQVAHVNCGNCRMLLMYQYGARSVKCAVCNFVTSVGASPGAEQKPSS

SEQ ID NO: 309 - DNA, 1000 bp, Arabidopsis thaliana
  misc_feature (1)..(1000): Ceres Promoter YP0388
agaagtattcacgcaccaaggttatatttgtagtgacatattctacaattatcacatttttctcttatgtttcgtagtcgcagatggtcaattttttctataataatttgtccttgaacacaccaaactttagaaacgatgatatataccgtattgtcacgctcacaatgaaacaaacgcgatgaatcgtcatcaccagctaaaagcctaaaacaccatcttagttttcactcagataaaaagattatttgtttccaacctttctattgaattgattagcagtgatgacgtaattagtgatagtttatagtaaaacaaatggaagtggtaataaatttacacaacaaaatatggtaagaatctataaaataagaggttaagagatctcatgttatattaaatgattgaaagaaaaacaaactattggttgatttccatatgtaatagtaagttgtgatgaaagtgatgacgtaattagttgtatttatagtaaaacaaattaaaatggtaaggtaaatttccacaacaaaacttggtaaaaatcttaaaaaaaaaaaaagaggtttagagatcgcatgcgtgtcatcaaaggttctttttcactttaggtctgagtagtgttagactttgattggtgcacgtaagtgtttcgtatcgcgatttaggagaagtacgttttacacgtggacacaatcaacggtcaagatttcgtcgtccagatagaggagcgatacgtcacgccattcaacaatctcctcttcttcattccttcattttgattttgagttttgatctgcccgttcaaaagtctcggtcatctgcccgtaaatataaagatgattatatttatttatatcttctggtgaaagaagctaatataaagcttccatggctaatcttgtttaagcttctcttcttcttctctctcctgtgtctcgttcactagttttttttcgggggagagtgatggagtgtgtttgttgaatagttttgacgatca

SEQ ID NO: 310 - DNA, 1000 bp, Arabidopsis thaliana
  misc_feature (1)..(1000): Ceres Promoter YP1692
  misc_feature (813)..(813): n is a, c, g, or t
  misc_feature (813)..(813): n is a, c, t, g, unknown, or other
ttgagatctcaatacgaaaatgaaccctttcgtttgatttatcaaagccttttattttgaaaacgttaaatcctcactaggatctctctttatattaatggttaaaaacatatgcatgttttgtgtttttgcatcttctttttcatagacaaaagcaagatgagtcttagaaggacatcaatgtcatagacatggctttagtatcttttgagtgtgctttaaatgatgatgatttaccctgaacctgaaattttacctattaattaatttaagtgtgcgttaaaccataaaccatatactctgaacctgaaattggttctaaagcacaacctaaacttgagattggagaatgctttaaaaggaaaaaaaaatcaaaggaaaccattaatgagccatcaaaaaatattcactaatatgacaagatgcattgtttatttttcttttcagaatcctcagaaactaccactaaactcctcaaggaacaaaaccatatcatgaattaggctggcaatttaactctgagacgtctttcttgtatagagaataaaacatacgcgtgtaaaagaaaacgcgtgaatcgaatgatgagtgttaacgttcgatcgagatgccaccaaatcttttcattaaaatgaattgtggaggacataccacttttaacgaggtcatttccactgggtgacatgtggactctactttgggtggcatgttcatatctttccacatcaccatgtaaacgtgaaaacacccaccacactcacttacatctcaaacacatgtcttcattatcgtacgtagctccaaaaaaaaaantgaaaactaggtttagtgattctatttcgcaatgtataatatacaacttgtaaaaataaaatatttgaataagcattataaataaacccaaagaggtgttagatttatatacttaattgtagctactaaatagagaatcagagagaatagttttatatcttgcacgaaactgcatgctttttgagac

SEQ ID NO: 311 - DNA, 1500 bp, Arabidopsis thaliana
  misc_feature (1)..(1500): Ceres Promoter YP1894
tttttatgatcgcaagaaacaattgttatgttattggtgtaatgttttgtattcttcattttatatattcatattattaaacattattctctatgaattttttatatatatagaaaagttacatagtgtaaattatatattagaccgttgttctagtatattctaatctggttaataatgaacgtttgcgtggcctaatggataaggcgctcgcctccgaagcgggagattgtgggttcgaatcccatcgcgaacgtagttttttgttttcagcaatttgcttatttcgttgaaacttggataacaacattcatatgtggctcttagtcgacgaatatgtatgcgtcggctaatttggaaaatctgatagcggcatcccaataactatactcgtaatttagcaagatgattacatgcataaccactctgacttataagagcgagacatgtatatagtgtagagtgtacatacgtaagcaaacatcaatcaattttgtcttgattggtgatggtatattcattttttatgtagcatctctagatgctttcggataaaggtgatatgaatatgtttacaagaaagagaaagaaaatgatatatttctgaataatgtttttttggataaatcctcaataatgttgtttcgaatctatgatctctacaatattattaaacatatatacctacaaatttagcatctatacgggtaagacgaccattcatatatataagggatcatgaagacaacacaaataagacatccacaaataaattaataagccaacttggtcttaaaaatcaggcatcttattcttaacaaactttagctgatcgattagtatttgcactaaccaaagaaataataatttagtttactaacataattgcatatatatatatattatacaattagtagagtggctataaagcatgccacatgcacattctttaatggacagacatttgaatattgaagagtttatcgtaaactaaatgtcatttgaaaactgctaaaggtcttttattttatatactcacataatcacatcaagaatatgacttattatattcatcgtttttggtcgataataatgattctttacaataaggacatgttgagcatgtttataacttatttaatttgactcgttgaattgttattattttgttaatatgcttagattccacatctaaaataatatctaatgcagatcatatgtaatgcacattaaaggttttacctccgataatttaatattccaattaattaatatgcaatggcagtgtaactaacggcagccgttagttaatggagtcggttgcttgcttagtttttgttctcgaagcttgacttttgaaacagaatgctgtttaacctccttaaacggaatattctcttttttagtactttgattctattcctctatataaacctctctctctctcacgaatcagagatacgaagaaactaacaacaacaagaaaaaaggaatattccg

SEQ ID NO: 312 - DNA, 999 bp, Arabidopsis thaliana
  misc_feature (1)..(999): Ceres Promoter YP1976
agttcgactatagaatacaatacaaaggacacaaaatcttcatgtacaatcaaaaattatcaaccccatatcttatagttggaaacgatccaaaataggttatataaataaaatatataaaatatgtcaagtataacaactcacatcacccttttggcttttggggaaatatcggatttatagaaaaaaaaaaataataataataattaaracaataaaatatttggtctgaatcttttttgagatactgttgtatcataacaatatcttttagagtcattcaacatcaatccacatgtattgcactggaacatgcattttaataaggttctatgtttgttaaattatgcagtcatgtaataatcaaattttatgataatgtctttgtaaacgctataaactaaaaatttataatagttacatgtgtaaaaaatgttgtcgcttaaccatgtcatatatatgttggttggtatacgtggatatacgatacatataattggtgtagttagctctcatttttttttttgttttgtacattatcgtcgtacgtcgactttgtatactactttatactccgtcaaactaaaataacttaaaatataataaaattgtattcattatattcacagaaaaataaaaatgttattcttgtaacaagtcaaactaaaaaaaagggaaaataagaatgactaaatgtttatgaagacgaaagagagaaaacatttttgtatttttattgacattttttagcagtcaagatgttagggtgaggaaatgaaaagttaatagaaacatgtatagtaaaagagacatttttttttgattgtagatagtgaatgtacgagtatactatcccccttagatttaaaaaaaaaaaacattttgcagaattattcataaactaaaatttagaaaataatgtaggagttaggtgaaccgcttatatataataaagacccaattagtaagtagatcaaacacaaatcaaatcagccatac

SEQ ID NO: 313 - DNA, 1000 bp, Arabidopsis thaliana
  misc_feature (1)..(1000): Ceres Promoter YP2016
attacattctcttaacctgcaaagtgtatatcgtccaagtaaaaccttcttgatttaattcgcgttgaaccaaatttaattatattccacttttggattgaaactatcaaattcaaattagcttgacttatgaaacaagagcgacccctcgaggttagtggacttttatgaaacgcgaccgactcttcaaggcccaaagaaaaagagaatattcggcgggataggggtacgtttgtaatttggcaaacgatgttatgttaaaccctaacttattatttctttcgattcaccactataaataaactcgaatcccaaacatagctttattccttgcttcatttttcgtcaccctagccgctttactctcttgcgatatctctgaggtaagctttttcgtcaccatcttcgatctgcttctttctcttctgttgatctgtgttgaatctgtttcgatccttctcgtttgtttgttgtaatctcttggattcgattctctttgtttatagatcgtttggaatttctgatctgtggtgtaaagttttatcgatttaggagaacaaagttttacagtgccatcgtattgttttttttcttcatgccagctgatgataaactatatgatcgatctggttctgaaatttttgtattgttcaatggattgttgattggatcttttgatgtatgtgatattaattgtcgatttgaattgtgattaggtaattctggagcagcataaacaatcaattgattcattcttcttgataccaagttgtggaaactctaggattgtttgctgtatatctccagaattgctgttttgattgaatttaggtcgcttagctcagttgatagagcaccacattttttgtggtagaaatcggtttgaatccgatagcggcttttaacaatgattgttttttgtgttcataagtctactgtttttcttgattcaatatttgattgttctttttattgcagatttgtttgacagtctctaacc

SEQ ID NO: 314 - DNA, 397 bp, Arabidopsis thaliana
  misc_feature (1)..(397): Ceres Promoter YP2097
ccaaattaaatgagcctattgggcttcttgtcttagtcggtgtagagcccaattgttgttttattttttaataatgcaaaagtattaagcgataaataaataagcatcgcaatcgtcccaaaactgtgtgtatgcatcagacatgagcatatagagtaagcacgtgtccacactttttcacaaagttatctaaaaacaaaaaacaattaattagcattcgacgtgtacatatcactcgccacgtgtacaagagccttggcctttttgcttcttcttcttgtctattaatatcatctcctgattatactctcttttgaccaagctgcttcttctccatctatccaacatctcaaatctcagtaatcttgtcccttcgattctgttttggacgtttgta

SEQ ID NO: 315 - DNA, 1039 bp, Arabidopsis thaliana
  misc_feature: Ceres SEEDLINE ID no.ME03047
  misc_feature: Inplanta Sequence
  misc_feature: Encodes the peptide sequence at SEQ ID NO. 316
cttacgcgtcatgtaaaaaaaaaagaagcgtaaattacgaaaaacagagagataaatccgggcattgagattttggagatagagagagagaaaaatcgaaatctattgtctatctcctcaatttggattggattttctgcatatcatcgctctagatttcgcgggttttggattcgattccttacccttctccaatcgaagtttttgggtttgaattggatttgggtttcgttccaaaatcagctctttttgttaatcagcagatatgcaggaccagctggtgtgtcatggttgtaggaatttattgatgtatcctagaggagcatctaatgtgcgttgtgcgttatgtaacactatcaacatggttcctcctcctcctccacctcacgacatggcacacattatatgtggtggttgtagaacaatgcttatgtatacgcgtggggctagtagcgtaagatgctcttgctgtcaaactacgaaccttgtgccagcgcactccaatcaggttgcccatgctccttccagtcaggttgcgcagatcaattgtgggcattgtcggacgaccctcatgtatccttacggtgcatcatccgtcaaatgcgctgtttgtcaattcgtaactaacgttaatatgagcaatggaagggtacctctcccaactaaccggccaaatggaacagcttgtcccccctctacatcaacttcaacaccaccctctcagacccaaaccgttgttgtagaaaaccccatgtccgttgatgaaagcggaaagttggtgagcaatgttgttgttggagtgacaactgacaaaaagtaatcaagaatgagtgagatcttaaagatcaaatccaaattcttcctctattcctgcgtttggtttgtgcatattacatacgcggaaaaactgtatgttatatatctcttgactcctttttaacccaagagaaaaagcttatcagaatctcttgttactgcattattggggtttattcaaagttgaagacacaaggtttttgcccaaaaaaaaaaaaaaaaa

SEQ ID NO: 316 - protein, 184 aa, Arabidopsis thaliana; identical to SEQ ID NO: 251
  misc_feature: Ceres SEEDLINE ID no.ME03047
  misc_feature: Bit score of 391.3 for HMM based on sequences of FIGURE 11.
  misc_feature (95)..(119): Pfam Name: zf-LSD1 Pfam Description: LSD1 zinc finger

SEQ ID NO: 317 - DNA, 513 bp, Triticum aestivum
  misc_feature: Ceres CLONE ID no.1324588
  misc_feature: Encodes the peptide sequence at SEQ ID NO. 318
ttccttcaccgcgtctcctcccagacaaaatcccatccggaatcaacttctctccctccgatcctcttcctcccccttccctgccgcctccgccggcgagaatcgctgtcgcgcccgtcgccacgacctaggagccctccttcacgggcggacctcttcccggagccaccggagggcggggacgggcggccagtctcgtccagagccggtatgcagagccagatcgtgtgccaccgttgccggagggtgctggcctacccgtcaggggcgcccagcgtgtgctgcgccatgtgccgagccatcaccgccgtgccacccccagcgccagcagtggaaatggctcagcttatatgtggtggttgccgaactttgctgatgtacacccgtaatgcagacactgtgagatgctcatgttgcagtactgtcaatcttgtcagaccagtcaataatatagcccacgtgaactgtggtcggtgccggacaactttgatgtatccacatggagcaccttct

SEQ ID NO: 318 - protein, 101 aa, Triticum aestivum
  misc_feature: Ceres CLONE ID no.1324588
  misc_feature: Bit score of 103.8 for HMM based on sequences of FIGURE 11.
  misc_feature (48)..(72): Pfam Name: zf-LSD1 Pfam Description: LSD1 zinc finger
  misc_feature: Functional Homolog Of Ceres SEEDLINE ID no. ME03047 at SEQ ID NO. 316
MQSQIVCHRCRRVLAYPSGAPSVCCAMCRAITAVPPPAPAVEMAQLICGGCRTLLMYTRNADTVRCSCCSTVNLVRPVNNIAHVNCGRCRTTLMYPHGAPS

SEQ ID NO: 319 - protein, 197 aa, Oryza sativa subsp. indica
  misc_feature: Public GI ID no.125560035
  misc_feature: Bit score of 177.6 for HMM based on sequences of FIGURE 11.
  misc_feature (135)..(159): Pfam Name: zf-LSD1 Pfam Description: LSD1 zinc finger
  misc_feature: Functional Homolog Of Ceres SEEDLINE ID no. ME03047 at SEQ ID NO. 316
MGAIHVSPIRGSIPFDKCTDLDHAAPANLQSDLCKTATAIRSRPPDSYRHMQDQLICSGCRRVVQYRRGVAGVCCPGCNTLTAVNPSAVADMSELICSGCPTLLFYNRGASNIRCPSCNRLNSTRSANQIAHLTCGQCRTTLMHPPGASTVQCATCRYVNHVRDARPQTVLVENPKTLDDKGKLVSNVVVGVTSWKR

SEQ ID NO: 320 - protein, 210 aa, Oryza sativa subsp. japonica
  misc_feature: Public GI ID no.125602083
  misc_feature: Bit score of 177.6 for HMM based on sequences of FIGURE 11.
  misc_feature (148)..(172): Pfam Name: zf-LSD1 Pfam Description: LSD1 zinc finger
  misc_feature: Functional Homolog Of Ceres SEEDLINE ID no. ME03047 at SEQ ID NO. 316
MMPEVSNKDVIISICVSDGYILSFVIEGRTDTDLDHASPANLQSDLCKTATAIRSRPPDSYRHMQDQLICSGCRRVVQYRRGVAGVCCPGCNTLTAVNPSAVADMSELICSGCPTLLFYNRGASNIRCPSCNRLNSTRSANQIAHLTCGQCRTTLMHPPGASTVQCATCRYVNHVRDARPQTVLVENPKTLDDKGKLVSNVVVGVTSWKR

SEQ ID NO: 321 - protein, 147 aa, Oryza sativa subsp. japonica
  misc_feature: Public GI ID no.115474647
  misc_feature: Bit score of 177.6 for HMM based on sequences of FIGURE 11.
  misc_feature (85)..(109): Pfam Name: zf-LSD1 Pfam Description: LSD1 zinc finger
  misc_feature: Functional Homolog Of Ceres SEEDLINE ID no. ME03047 at SEQ ID NO. 316
MQDQLICSGCRRVVQYRRGVAGVCCPGCNTLTAVNPSAVADMSELICSGCPTLLFYNRGASNIRCPSCNRLNSTRSANQIAHLTCGQCRTTLMHPPGASTVQCATCRYVNHVRDARPQTVLVENPKTLDDKGKLVSNVVVGVTSWKR

SEQ ID NO: 322 - DNA, 1850 bp, Panicum virgatum
  misc_feature: Ceres CLONE ID no.1909223
  misc_feature: Encodes the peptide sequence at SEQ ID NO. 323
acaaccctcctccatctcatctctctctctctctcctccagctagcttctcactctccagagtccagaacgcgtgcagttcgaagctaagctaggcgtgcgtccaggtccatccttctctagttgcgttcgaccacatccttccttctcgggcttcttgccttggtaaatcaatgttctttccttgggttcttgagccactacggatcagatagattgcatgcttgcttgggtttagcagccaagacgatttcttgatgcgcaagcgcaaggccttaccatggggggcaaggtctgggtttgatctataggcttgccacagcatgcacattgcctggcctgatcgaccggctcctgtgatcatgcatatagaggttcagacatctcaggttggatcatgcacagccacacggcacctttctgttgaatctgccggcaaaatgtgcgatcgccagcacaagcccttcatttgtcttccaacagataaaacttggcttctcaaatgccttgtgtttttgtttctaactcttctttaatggaaaggcagagcacgtgccattgtccctaaaaaaaatttgccttgtactatgcgtagtagcctctggaaatatggattggaatttcaaacttggaatgaagctagtagtatgattctaaccaaaccaagttccaattgcaggtatgcaggaccagctgatctgcagcggctgcaagcgtgttcttcagtaccgcaggggagccgccggcgtctgctgcccaggctgcaacactttcaccgccgccaaccagtcaggaccggacatgtctgaactcgtctgcggcggctgcttcaccatgctcgtgcacaaccgcggcgccgccaacattcgctgcccgcactgcggcagggtcaactcaacaagatcagagaaccagattggtcacctgtcatgcgggcattgccggactactctggcgtacccaccgggagcctcgacggtcggatgcccaacttgtcgctgcgtcaatcctgtcaggaacaacaactctggtggctctgcacggcctgcaccatcggtacgttctcctggcttttccaagtttcagtggtcactgcaatgttctgcaatagggcaaaatctaataggcgatactgcttgcatcaagaaacgtatggagccatcgagcaatcaatggccgcaacgcaaccatccttttttttgttgcgtcaaccagcaataaggttgtcctccccaaaagatcacaacattggtaggttcaggttgctccatggtttcagaggaatcagttccttggtaggcaagtagcaatgattagcacacctcgatgcttagatttttcgcttgaaatcctctggaccatgcatgtctagtatcaggatgaaagcgctggtccattggggtttgagcaaacagtctgaatctagctagactgatgtcaaatgttcgacggtgatgacacgtacgggctttattcgctgaactttcatgttcctacttgcaggatgctcggccccagacggttcttgtggagaatcctaagacgctggatgaaaagggcaaactggtgagcaatgtcgccgttggtgtcacctcatggaaaagatgaccaagaactcctccgcggcatcatcccaaggatctactgataaacccttggtgatggacatgtaaaactatcataatcaaactaatgtgaaatcaagtgtgttttgaagcttgatataagaaaaaaaatgtaacagttgagaagcaaaagatctgaagatgtaaatatgctagccggccgtgtgtgcgctagcctatgtactccaagccaaaaaggaatggaaaggagcgaagcattgtgttc

SEQ ID NO: 323 - protein, 179 aa, Panicum virgatum
  misc_feature: Ceres CLONE ID no.1909223
  misc_feature: Bit score of 117.2 for HMM based on sequences of FIGURE 11.
  misc_feature (84)..(108): Pfam Name: zf-LSD1 Pfam Description: LSD1 zinc finger
  misc_feature: Functional Homolog Of Ceres SEEDLINE ID no. ME03047 at SEQ ID NO. 316
MQDQLICSGCKRVLQYRRGAAGVCCPGCNTFTAANQSGPDMSELVCGGCFTMLVHNRGAANIRCPHCGRVNSTRSENQIGHLSCGHCRTTLAYPPGASTVGCPTCRCVNPVRNNNSGGSARPAPSVRSPGFSKFQWSLQCSAIGQNLIGDTACIKKRMEPSSNQWPQRNHPFFCCVNQQ

SEQ ID NO: 324 - protein, 136 aa, Zea mays
  misc_feature: CERES CLONE ID no.101114546
  misc_feature: Bit score of 79.2 for HMM based on sequences of FIGURE 11.
  misc_feature (62)..(86): Pfam Name: zf-LSD1 Pfam Description: LSD1 zinc finger
  misc_feature: Functional Homolog Of Ceres SEEDLINE ID no. ME03047 at SEQ ID NO. 316
MQSQIVCNGCRTVLLYPRGAPSVCCAVCHAVSNVPPPAGKSSSQNRLWAFKKVSSSIAHVNCGQCQIVLMYPYGAPSVKCAICNFITNVGGVTPRETFATCTTRINWKLIRHLVNFCANKSTAECNRCCRKPNDSR

SEQ ID NO: 325 - DNA, 718 bp, Arabidopsis thaliana
  misc_feature (1)..(718): Ceres Promoter YP2538
atgttgaacatctgaatattgtttttttgttctttttattctcattctcttatgtatacattcattactcaattttttaatgtactatactatatctttactcatcaaattattaactttgagactcactaatcaaaaaattctcactactcttttaaacacaaacacgttagatgttaaaattggttgtattcgccctcataaccaattggaaagtggcctaaataagagaatgatgcgacactaaaaagccgaagaaaattctagccatttgagagatgatacaatgagattcagctttaaaatgtatgacctatttattactgacaacaaacgaattacatttgtttacgatctttgagttcacaatggtttgcataaatgtctaacaaatgtcttgagaatttgtttcacaagacaagcaaaccaattgcactcaatttgcataaagtctctaaatagtaaaacaatacgcacatagttcttaagatcacaagataagcaaagcaattccactcaatttgcatatcacgtactatattgggtgttattgaataagttatgttattgggccgggcttcttggtttgtatctcaacaaaacaattatatcaacattcggcccacaagcccataattcagactttcgaaaaccctaatcttatgctcacctatataaactaaaacttgtgaatccgctagggtttacttcatcgaaa

SEQ ID NO: 326 - DNA, 1000 bp, Arabidopsis thaliana
  misc_feature (1)..(1000): Ceres Promoter YP2552
acattatgaacaaattcggagatcctgagaatttgcatatcccacgtacacgacctcaaaaccaatcaaattcaaatttcgttctttgaaagatatacttgcaattcatatacgttaaatcttcagtttttttttacacgagaatcagtactcattagcacagcctcattttatgctttcaatgtttttaacacgagaataagaattaggatcaagtggtttgtgcttgaaaaaagtactgactagaacttttttttatataaagagttttccacaaccctcggagacataattgagagaagatcatccttttaaataaatagtcttcactatagtaaattcgatttcattatatctgtcttactgtctatattataagagtatgcacacttggaaacatagggatgctgtgatctccgtttgtaaaataatctatgcacgtacaaaaaaaacattaaacacatttacatatttagatgcatacatgatacagtacatcaatgtatgtatacacacatatactgacactaacacatgcttagtgtgcgcaataattttgtctttactcagtaatttatgtataaataatttggtttagcgcattatatacaactggtccatttgcgcctagcgagtaatggttaatggttggtatgttaacaatttatcccaccagaaaaccatatcttttatcaaatcgcgacttcaaatatttaatatcagtcccacgacatcgacgccgtttaatattgttttatttgttcctttttctcaaattaacatattctagtaccggcaaaacattttttaatatattatgcgtctttctacaaatatatatatatatatatatatatatatatatatatatactcttctaagtatatgatgcaatggagtctctctgcatgaaagaataaaaaaaaaacatcacaatctctttccatttctgagagctaaaaaacctctctctctttctctttgattcaagtttccaaaa

SEQ ID NO: 327 - DNA, 1500 bp, Arabidopsis thaliana
  misc_feature (1)..(1500): Ceres Promoter YP2563
gagatcttgttcgtaattctgtgataatgtttgataacttctctgcccagtttgtttgaaattcagtacttgaggttctctattggacagaagatgaacatatggactacaacacttggacaatccgtaatggacaaccacacattttggttgcagcgtatgtgtcgttacaaaattgaaaatcaatgtccacgaccatacatgactgcacagcttggtgtttgataattcaaggaaaaagccacataaaggttctatttcttaatcttacattttggaagaaatcaaatcattgatttaagaaataatatgtaagcttggatgctagagctttaggtgatcctgtggccagattaggatattgatttaacttttcttactgctactcaacattgattgtctggtattaagttgtaaaagagtagtttgacttatccatttgtgttgatataattggttattataatgtgattagtcaatagaaaaccttagagtacataatatcaaacttttaactttgttaatttttttaggcgagtgggtgaatacatcagttagacttgcttttgcacatcatgtgatcatcgtttaattgttatatgatcggacggtcattatttctcattaacttctatttaaactgcaaatcttaccacgttcatttgatccgaattaacccattattctacacgtgtttggtacacacaattacaaaccaaaaccaatgaccggttattcttttttcgtgattcagtttatttggggtataatggtctattttcactccaaaaacaaagaaaaatatctcaaccttggaaaatacctgttttgtctaaactttttcccaaagtgccttattacggaacattccctacaaaaaaaccatcgtcatgtactggacaaaatattcttcaagtttgttttcatgttgtgttgggccgtttaattcgcatgtatcccatatcggaccttataaacttataagttataaacattaaaatataatccatttgtcaatccttttttccactttttttaattaagataaatcttaagtattaccaaatcattattaaatttttatatttattattctagctttaccatttacacatactttacccccattgtattttcattgccgaaatgtttcaaaaaaggatgatttaaggggcaataataatatttaaaaaaactgtgtttagtgatgaaacaaaacccgccgttggaaattaaaccagcccatagagagaaaaacctctcttaacgaagaaaaacaacaacatggcccctggtttctcttctctttcgaatctatcttcttcttttatccaatcctttcctatttttattctcaccttctcctcgtttttcccgaaactgttcttttgccctcttctctcaattttaatccaccaaacaaatcgaacagtgttcgataacttttagattgcaagtcctgtttttgatttggtcgggagaaagaaaactagggttttg

SEQ ID NO: 328 - DNA, 2001 bp, Arabidopsis thaliana
  misc_feature (1)..(2001): Ceres Promoter YP2571
aagcgaaacgttatcttatgcaatgtttacatttgcaacaccaattagcttcttttttttacagttgagacttgagagacacattaaagcttgtcatcgttcactggagagagtagagtgtgtgagagaccaagtgacctaacttcactgcaacagtagtcggtaaatatccaaacataagagctacgatggtaacacgtgtacggtggaggaaaagagagccctcagattccgttataaaggaggtgagacccactcgccggaatggaaacaaaggagaaacgtagaggtaaatggttgggccactgcttcaccaaaaagccttttctatcttctttttatttttgttttgtggcttttaacggttaacaatataactcctcattccaagacaattacgtgtcctctgtacggctttttcatttttcactttctacttcatagtgactttagggaggcctcaatttttaattactcgaggattatttaggtaatcatgaatgtaactacagctttacaggtaattaaacagatgagatttagttgcgtgaaatctagctgatctggtgcttatatcaaatccaattgatggagacagatttggacttaaattcatgattgtatttgtaatcttatatacgttatagttaaatttctttctctccgtacgtactctaactataattattattaaatgctgaacgcaatgcttttgagtgctgagaatctttttggtctgattcaaaaatgatgtattagtactctgaattcaatcttaacttctgcaacgaatcaatgtattaatttataggagatccggataaaattatggatatatgcacgctacttctttcatttttaattaggtaaatggttataactttattttatatatcaattaaatgattttggtatgagattactagtacactttctttgcaaatgttttaaacacgacaagacaaaaatattacaagcatattttggtaaaaaatatcataagctttcatatcaaaatcattagttatgatgttagattttttttttttttttttaacactacaaaaagctctggtcttaatatgttagaaattttagtccaaaccagcctacagaggatttagctaaacaattcccaagcaccttttaagtgttaaccgaaataacgtaatatgatgttaaaggttacataaaaacaaaactaaagaattttcatatgaaaagttaacgtacgtgtcttagtgtaacctaattttagttcacagtatataaattctttaatgagatgatcgcaaaatcgctgtatacaatttcgtacttaattcgttagtcttgaaaagttgacctaatttagatcaaattaaggttaactacaataaaaatttaactaacgtaatgggattctttaaaattaaaaaatcgttgattagatagatattttatctttaagggagacacagagacaatttggacaaaaaaggtcttcctgagaaagaagtggaccacaatcgtggcgcgaaaggaacttcctcctcccctctgttgccttgtcattgggccacgtatatctccacctgatcgtgatgcttacgtggtccatttctagatactatagtgaccagatcaacggtcaagattgattctaatttagacgaaagaccaacccgtcacgtcgctagagtaaaagattttttgaaggcggagggagaaaaatcaaaagttaaaagtaatttgaaaacgaggaagagaaaaaggaattttaaaatgtttaatgaagcggtaggccgcatgggtatataaatgggcccgctttgtaacgtgtaacgatgatatttattcaactgcgtggtataaccaaaaaaaaaaagaaacactattcgactctttttttgtttttgtaataaacataaaataaattttggagagagatatttcgtcggaaattaattgacgttcaaaagattcgttaccggaatatttagtagaggcggcgatcgagtt

SEQ ID NO: 329 - DNA, 514 bp, Arabidopsis thaliana
  misc_feature (1)..(514): Ceres Promoter YP2590
agaagggcttgctgtccgttgctcatctcatatagtaaggcccaaaaggcccaaaggcttctttttccaattaaaactaatttttgtatagcgaaattatgatgaagaaaatcgtttcatggcacgtcaaaaaactttcgcacaacaatttttttttacaaaagggtcacttttatcagaacctaatctatcatagagttcccatcaacaaaaaacctatcatagagtctagtcctgtgttaacgtaggtgatgggttggtttcatggtttacatggacaattattatggtgtaagaaaaagatgatgggtacacatattccatttaaccaatgtgaaagattcacatcacctttttcgatttttaatagattcggttttaccttctcgtaacgtaattctaagaaaagaaaacgtcaatcatatttactaggaaagataattataatttattgctttttctctcactctctgacctgaaatctcctactgagatttttgaagtgtattcaaca

SEQ ID NO: 330 - DNA, 964 bp, Brassica napus
  misc_feature: Ceres CLONE ID no.1064300
  misc_feature: Encodes the peptide sequence at SEQ ID NO. 331
attttggattggcctctttacatatctgctctttagagttttccggttctgaaatcggatcccctcttccccatcttcccaatcggagctttttggctttgaattggatttgggtttcgaaaagccatctccttttcttcttcgcatcatcccctttggagaaatcagatatgcaggaccagctggtgtgtcatggctgtagaaacacattgatgtatcccagaggagcaaccaatgtccgttgtgcgttatgtcacattgtcaacatggtcccccttcatcctcatcctcctcctcctcctcctcctcatcatgctcatgcagggatggacatggctcacattgtatgtggtggttgtcgaactatgcttatgtacacgcgtggggctagtagtgtaagatgctcgtgttgtcagactgtgaaccttgtcccaggacccccaccgtccaatcaggttgcgcatatcaactgtgggaactgccggacgacactcatgtacccttacggtgcatcatctgttaaatgcgctgtttgccagtttgttactaacgttaacatgagcaatggaagggtgcctctcgcaagtaaccggccaaatggaacagctgctcccgggacaatgccctctacatccacttcaacaccaccgtctcagacacaaactgtcgtcgtagagaacccaatgtcagttaatgaaagtggaaagttggtgagcaacgttgtggttggagtgacaacaggccaaaaataacttttaaagaatcatttgatctgaaagatcaaaattggttccgtctatccctgcttctggtttgtgcatattacatactgttgatgaacactttttttttgttgttaaaaaaaaagttgatgaacataaaggttttttggttcagtaatctgtcattcctgtttgtagactccattgaccatttgtggcattgttaatgtatgtattactat

SEQ ID NO: 331 - protein, 193 aa, Brassica napus
  misc_feature: Ceres CLONE ID no.1064300
  misc_feature: Bit score of 398.8 for HMM based on sequences of FIGURE 11.
  misc_feature (101)..(125): Pfam Name: zf-LSD1 Pfam Description: LSD1 zinc finger
  misc_feature: Functional Homolog Of Ceres SEEDLINE ID no. ME03047 at SEQ ID NO. 316
MQDQLVCHGCRNTLMYPRGATNVRCALCHIVNMVPLHPHPPPPPPPHHAHAGMDMAHIVCGGCRTMLMYTRGASSVRCSCCQTVNLVPGPPPSNQVAHINCGNCRTTLMYPYGASSVKCAVCQFVTNVNMSNGRVPLASNRPNGTAAPGTMPSTSTSTPPSQTQTVVVENPMSVNESGKLVSNVVVGVTTGQK

SEQ ID NO: 332 - DNA, 995 bp, Brassica napus
  misc_feature: Ceres CLONE ID no.1123331
  misc_feature: Encodes the peptide sequence at SEQ ID NO. 333
aatttggattggcctctttgcatatctgctctttagagttggccggttctgcaatcggatcccttcttcccccatcttccaatcgaagcttttggctttgaattggattttgggtttcaaaaagccacctccttttcttcttcttatcatccatccctttggagaaatcagatatgcaggaccagctggtgtgtcatggatgtagaaacacattgatgtatcccagaggagctaccaatgtccgttgtgcgttatgtcacattgtcaacatggttcctcttcatcctcatcctcctcctcctcatcatgctcatgcagggatggacatggctcacattgtatgtggtggttgtcggactatgcttatgtatactcgtggggctagtagtgtcagatgctcgtgttgtcagactgtcaaccttgtcccaggacccccaccgtccaatcaggttgcgcatatcaactgcgggaactgccggacgacactcatgtacccttacggtgcatcatctgttaaatgcgctgtttgccagtttgttactaacgttaacatgagcaatggaagggtgcctctcgcaagtaaccggccaaatggaacagcttctcccgggacaatgccctctacatccacttcaacaccaccgtctcagacacaaactgttgtagtagagaacccaatgtccgttaacgaaagtggaaagttggtgagcaacgttgtggttggagtgacaacaggccaaaaataacttttaaagaatgatttgatctgaaagatcaaaattggtttcatctatccctgcgtctggtttgtgcatattacatactgttgatgaacactttttttttttgttaaaaaaaaagttgatgaacacaaaggttttttggttcagtaatgtggcaatcctgtttgtagactccattgaccatttgtggcattgttaatgtatgtattactataatctgatacaccagccaaacattaagatttgagtttg

SEQ ID NO: 333 - protein, 190 aa, Brassica napus
  misc_feature: Ceres CLONE ID no.1123331
  misc_feature: Bit score of 398.7 for HMM based on sequences of FIGURE 11.
  misc_feature (98)..(122): Pfam Name: zf-LSD1 Pfam Description: LSD1 zinc finger
  misc_feature: Functional Homolog Of Ceres SEEDLINE ID no. ME03047 at SEQ ID NO. 316
MQDQLVCHGCRNTLMYPRGATNVRCALCHIVNMVPLHPHPPPPHHAHAGMDMAHIVCGGCRTMLMYTRGASSVRCSCCQTVNLVPGPPPSNQVAHINCGNCRTTLMYPYGASSVKCAVCQFVTNVNMSNGRVPLASNRPNGTASPGTMPSTSTSTPPSQTQTVVVENPMSVNESGKLVSNVVVGVTTGQK

SEQ ID NO: 334 - DNA, 961 bp, Brassica napus
  misc_feature: Ceres CLONE ID no.1069051
  misc_feature: Encodes the peptide sequence at SEQ ID NO. 335
aaattttccttgaatttgtaatcccagcagcactgtactcttcaatttcatacaaaaactcatgatttgatgatggatgcaggagctttttggctttgaattggatttgggtttcgaaaagccatctccttttcttcttcgcatcatcccctttggagaaatcagatatgcaggaccagctggtgtgtcatggctgtagaaacacattgatgtatcccagaggagcaaccaatgtccgttgtgcgttatgtcacattgtcaacatggtcccccttcatcctcatcctcctcctcctcctcctcctcatcatgctcatgcagggatggacatggctcacattgtatgtggtggttgtcgaactatgcttatgtacacgcgtggggctagtagtgtaaaatgctcgtgttgtcagactgtgaaccttgtcccaggacccccaccgtccaatcaggttgcgcatatcaactgtgggaactgccggacgacactcatgtacccttacggtgcatcatctgttaaatgcgctgtttgccagtttgttactaacgttaacatgagcaatggaagggtgcctctcgcaagtaaccggccaaatggaacagctgctcccgggacaatgccctctacatccacttcaacaccaccgtctcagacacaaactgtcgtcgtagagaacccaatgtcagttaatgaaagtggaaagttggtgagcaacgttgtggttggagtgacaacaggccaaaaataacttttaaagaatcatttgatctgaaagatcaaaattggttccgtctatccctgcttctggtttgtgcatattacatactgttgatgaacactttttttttgttgttaaaaaaaaagttgatgaacataaaggttttttggttcagtaatctgtcattcctgtttgtagactccattgaccatttgtggcattgttaatgtatgtattactat

SEQ ID NO: 335 - protein, 193 aa, Brassica napus
  misc_feature: Ceres CLONE ID no.1069051
  misc_feature: Bit score of 396.0 for HMM based on sequences of FIGURE 11.
  misc_feature (101)..(125): Pfam Name: zf-LSD1 Pfam Description: LSD1 zinc finger
  misc_feature: Functional Homolog Of Ceres SEEDLINE ID no. ME03047 at SEQ ID NO. 316
MQDQLVCHGCRNTLMYPRGATNVRCALCHIVNMVPLHPHPPPPPPPHHAHAGMDMAHIVCGGCRTMLMYTRGASSVKCSCCQTVNLVPGPPPSNQVAHINCGNCRTTLMYPYGASSVKCAVCQFVTNVNMSNGRVPLASNRPNGTAAPGTMPSTSTSTPPSQTQTVVVENPMSVNESGKLVSNVVVGVTTGQK

SEQ ID NO: 336 - DNA, 1121 bp, Brassica napus
  misc_feature: Ceres CLONE ID no.968078
  misc_feature: Encodes the peptide sequence at SEQ ID NO. 337
aatcttattgtccatatctctcagtttggattggcgtctctctgcatatagctcttcgcgggttttgcaatcgagatccctcttccaactccaatcgctagaaccaatctttttcttgaattttgtaatctggacactgttcgtctgattcatatgatgataatggatgcagaagctttttggctttgaattggatttcgggtttcgttttcaaagccagctcctttgtcttcctcggagagagatcagagatgcaggaccagctcgtgtgccatggctgtagaaatacattgctctatcctagaggagctaccaacgttcgctgtgccttatgtaacactatcaacatggtccctcttcatcctcctcctcctcctcctcatcatcatgctcatgcagggatggacatggctcacattgtatgtggtggttgtcgcacaatgcttatgtatactcgtggggcaagcagcgttagatgctcttgctgtcagactgtcaaccttgtccctgcaaccccacccaccaatcagcctgcgcatatcaactgtgggaactgtcgaacaaccctcatgtatccttacggtgcaccatccgttagatgcgctgtttgccagttcgttactaacgttaatatgggcaatggaagggtgcctttcccaactaaccagccgaatggaacagcctcctctcccgggtcaatgccctctacatccactcagtcaacaccaccgtctcagacccaaaccgtcgtcgtagaaaaccccatgtctgttaatgaaagtggaaagttggtgagcaatgttgtggttggagtgacaacagacaagaagaaataacccacgagaaaaaaaaatgattgcagtctctatccctgcgtctgggtttgtgcatattacatacgcggacaagtgactgtttatgttataagttataactccttttttaaccccccccccccccaaaaaaaggcttctcagaatctcttgtttggttttttttttccttctttcaaagttgatgaacacaaaggtttttggtcctacaatctgccattcctatttgtagactttgtaaacttcattgccccctttgtggcattgttaatgtatgtattactatac

SEQ ID NO: 337 - protein, 194 aa, Brassica napus
  misc_feature: Ceres CLONE ID no.968078
  misc_feature: Bit score of 393.3 for HMM based on sequences of FIGURE 11.
  misc_feature (99)..(123): Pfam Name: zf-LSD1 Pfam Description: LSD1 zinc finger
  misc_feature: Functional Homolog Of Ceres SEEDLINE ID no. ME03047 at SEQ ID NO. 316
MQDQLVCHGCRNTLLYPRGATNVRCALCNTINMVPLHPPPPPPHHHAHAGMDMAHIVCGGCRTMLMYTRGASSVRCSCCQTVNLVPATPPTNQPAHINCGNCRTTLMYPYGAPSVRCAVCQFVTNVNMGNGRVPFPTNQPNGTASSPGSMPSTSTQSTPPSQTQTVVVENPMSVNESGKLVSNVVVGVTTDKKK

SEQ ID NO: 338 - DNA, 1005 bp, Brassica napus
  misc_feature: Ceres CLONE ID no.949032
  misc_feature: Encodes the peptide sequence at SEQ ID NO. 339
aatttggattggcctctttacatatctgctctttagagttttccggttctgaaatcggatcccctcttccccatcttcccaatcggagctttttggctttgaattggatttgggtttcgaaaagccatctccttttcttcttcgcatcatcccctttggagaaatcagatatgcaggaccagctggtgtgtcatggctgtagaaatacattgatgtatcccagaggagcaaccaatgtccgttgtgcgttatgtcacattgtcaacatggtcccccttcatcctcatcctcctcctcctcctcctcctcatcatgctcatgcagggatggacatggctcacattgtatgtggtggttgtcgaactatgcttatgtacacgcgtggggctagtagtgtaagatgctcgtgttgtcagactgtgaaccttgtcccaggacccccaccgtccaatcaggttgcgcatatcaactgtgggaactgccggacgacactcatgtacccttacggtgcatcatctgttaaatgcgctgtttgccagtttgttactaacgttaacatgagcaatggaagggtgcctctcgcaagtaaccggccaaatggaacagctgctcccgggacaatgccctctacatccactcagtcaacaccaccgtctcagacacaaactgtcgtcgtagagaacccaatgtccgttaatgaaagtggaaagttggtgagcaacgttgtggttggagtgacaacaggccaaaaataacttttaaagaatcatttgatctgaaagatcaaaattggttccgtctatccctgcttctggtttgtgcatattacatactgttgatgaacactttttttttgttgttaaaaaaaaagttgatgaacataaaggttttttggttcagtaatctgtcattcctgtttgtagactccattgaccatttgtggcattgttaatgtatgtattactataatctgatacaccagccaaacattaagatttgagtttg

SEQ ID NO: 339 - protein, 194 aa, Brassica napus
  misc_feature: Ceres CLONE ID no.949032
  misc_feature: Bit score of 394.6 for HMM based on sequences of FIGURE 11.
  misc_feature (101)..(125): Pfam Name: zf-LSD1 Pfam Description: LSD1 zinc finger
  misc_feature: Functional Homolog Of Ceres SEEDLINE ID no. ME03047 at SEQ ID NO. 316
MQDQLVCHGCRNTLMYPRGATNVRCALCHIVNMVPLHPHPPPPPPPHHAHAGMDMAHIVCGGCRTMLMYTRGASSVRCSCCQTVNLVPGPPPSNQVAHINCGNCRTTLMYPYGASSVKCAVCQFVTNVNMSNGRVPLASNRPNGTAAPGTMPSTSTQSTPPSQTQTVVVENPMSVNESGKLVSNVVVGVTTGQK

SEQ ID NO: 340 - protein, 193 aa, Brassica oleracea
  misc_feature: Public GI ID no.17981380
  misc_feature: Bit score of 389.1 for HMM based on sequences of FIGURE 11.
  misc_feature (98)..(122): Pfam Name: zf-LSD1 Pfam Description: LSD1 zinc finger
  misc_feature: Functional Homolog Of Ceres SEEDLINE ID no. ME03047 at SEQ ID NO. 316
MQDQLMCHGCRNTLLYPRGATNVRCALCNTINMVPLHPPPPPPHHAHAGMDMAHIVCGGCRTMLMYTRGASSVRCSCCQTVNLVPATPPTNQPAHVNCGNCRTTLMYPYGAPSVRCAVCQFVTNVNMGNGRVPFPTNQPNGTASSPGPMPSTSTQSTPPSQTQTVVVENPMSVNESGKLVSNVVVGVTTDKKK

SEQ ID NO: 341 - DNA, 1002 bp, Arabidopsis thaliana
  misc_feature (1)..(1002): Ceres Promoter YP2606
cacaacaaaagagagctaatgttttgtaagttagagatgatatttctttgtttatttgttctgtaatgcttgtatatatatatatatattgatcttttctttattattcacatgataaaaacatctaaacagaaataaaaataaaggaaagtgaatgaatgttgaaaaatgtaagattgactacattgatttctatatgcaccttctcaacatgttaaaaataatagcaattaacttaattcatagaaataattattatatttccatgtggtcatgtgtaatacatagatacaaataattattaacgttatcccatggttttctatccattttttatactttaaaaagtgaattcaaagttcaaataaataattatgagattaacattatcccatgcgttgattctctatccataaactctttttttttttttgtcaaacgatctttccatatacatactttaaaagttgtattcaaaggccaacaaaaaattattcccttaaacttgtcccaggaactaaaaattagaaaatatatatccctttccccaaaaatttaaaaaaacctttttcgtcgcaatattttttttttatagggtttatacgggatttgtatcccaaccaggattatataatcaattttttgccccaaaaacaaaataatgaaaaaaaatgaagggtttttttgcccaaaagggaaaaagtttttttttttttttttttttacctttactttaaataaaatatatataagcatacaaactaataatatatgatgcttattgttttttatttaaaatgtagaactttgactatatcaattattttggtcaaagtcttcataattttgtatatatgtttcctataaagatttattatagatcatgtaccatttttcacagtctataaaaaggttatttctctctaccattttcaatatcaaaaagtttcttcaaacaaacaagtattagattaacattatcctcttcattttcagcaatcc

SEQ ID NO: 342 - DNA, 1000 bp, Arabidopsis thaliana
  misc_feature (1)..(1000): Ceres Promoter YP2608
tgaaataagttgtacaccaaaaagtttgaatatccggttacaaaaattaggtaggctgaggtttgaaaattgagttccagttgttatgatatttggggacatccattaaaaagtatagtatgaaattttaacaaggtctaattaattttttgaaggaaaaaatatataactaagcataaataaaaatcttatagaaacataaatataagaaaaagattaatatatgatgcttataatgatgagctgtcgtctcatattctcgtttgattcaaaacgatagaaatcgacaaagaaggtgtgaagaagttgggaaaacaaaattaacgcttgaagaatctaaaggtttagcttttttctcaatccgatcattcaccgagaaatattctattttatatatttatgtgaagctcttcaattgaagaaagaagaagaaaagacaatcgtcaaatgcttgactttggtttcagttcttcttcacgacagctcaaggtgatgatcatttttattttactcttctacctaatcatatcactgcgaatcttttccaaagtttcgctctttattctctcaatgtgctttttttctgagttgttgttgaactagggttcttctgggtactagtaactgttttgctgattttctgagctgcttttggctatagaatttcagttttcaaaccaaaccttgtcgatttcaaatcaattctagtcggcagtagatctgatctgtctctattgggctaggttttacagtgtatcaattcaccactagttcaaagttcatcagtgcttacacaagtttacttttttttgtatgtgttcatgatttagctaatgatcaagatacttgagatataataacacaccttatttaatgcaaatgggcctacaaattctactaggaagatcggctctttgatgggatgggacaccaagaaatcaccatgggtttatgatgctatcaattactagtagtacgtgttatcttctgaatatatatc

SEQ ID NO: 343 - DNA, 1219 bp, Glycine max
  misc_feature: Ceres CLONE ID no.613904
  misc_feature: Encodes the peptide sequence at SEQ ID NO. 344
aaaacgtagactaatagtcgctgaagaaatttccgaaagtgtgtgtgggatgagaagatgatgaggaaacattggtagaagaaattgaagagagagagagagagagggttggattggttttcttcttccttttctctaaagagaatctaatctcaatcctcaatacagatttcttcattcctctctcagtcttttctgttttccccctttgacatcctcgttttcgccgaaacaaaaacaactaagatttttttgtttgttttgtttttcttctccttgttgttatttgactcggttgtctgaatcggttgttgcagcagggtcgggagccacagctatgcagagccaagttgtgtgcaatggttgtaggagccttctgctttacccaagaggggcaaccaatgtttgttgtgcattgtgcaacacaattacctctgttcctccccctgggatggaaatgtctcaactttattgtggagggtgtaggacattgctaatgtacacacgtggagctacaagtgtgagatgttcctgctgtcacactgtaaaccttgttccaccagcatctaatcaagtagctcatgtccattgtgggaactgccggacaacactcatgtatccttatggagctccatcagtcaaatgtgctctttgtcactttattactaatgtcagtacgaacaatggaaggcttccgatccctgtccatagacccaatgggacaaccaatgctggaacattacctactacttcaacatcaatgccccaatctcaaagtcaaacagtagtggtagaaaatccaatgtctgttgattcaagtgggaaattggtgagcaatgttgttgttggggttacaacagataagaaataacgccatcacatatagaaggtacagttcacgtcgtgacgcattaccacagttgctgtcacaggaagatattgtttgtgtatatgaatatatatgatattgcagcctgcaattgttgaattgaaattgatatttttccaatataagagctggacgaatatcatgtacgtatgtatgaatgtatatgaggtggacaagtcgtgaaaagggcttaaaacctgttttgtgtgattaccaaagcctactttgttgtttccttggtagccatacccaaatcaattagttcattcacattatatgtttgacttgtaagtcctaaactagtaaatggtatttctttcatgtcttgtg

SEQ ID NO: 344 - protein, 177 aa, Glycine max
  misc_feature: Ceres CLONE ID no.613904
  misc_feature: Bit score of 402.5 for HMM based on sequences of FIGURE 11.
  misc_feature (85)..(109): Pfam Name: zf-LSD1 Pfam Description: LSD1 zinc finger
  misc_feature: Functional Homolog Of Ceres SEEDLINE ID no. ME03047 at SEQ ID NO. 316
MQSQVVCNGCRSLLLYPRGATNVCCALCNTITSVPPPGMEMSQLYCGGCRTLLMYTRGATSVRCSCCHTVNLVPPASNQVAHVHCGNCRTTLMYPYGAPSVKCALCHFITNVSTNNGRLPIPVHRPNGTTNAGTLPTTSTSMPQSQSQTVVVENPMSVDSSGKLVSNVVVGVTTDKK

SEQ ID NO: 345 - DNA, 927 bp, Glycine max
  misc_feature: Ceres CLONE ID no.1609278
  misc_feature: Encodes the peptide sequence at SEQ ID NO. 346
aaaatattggtatagccgcgagcgaggtttcgtttcgttcagttcacacattctaatctctatcgattcctcttccattttctcaattcactacaccccagtttatgggaagccaacttgtgtgtaatgggtgtaggaacatcttggtttaccctagaggagcaaccaatgtttgctgtgcattgtgcaacaccgttacctctgttcctcctcctggaatggacatgtcacaactttattgtggaggctgtacgacattgctaatgtacacacgtggtgctacaagtgtgagatgttcctgctgtcacactattaaccttgtaccagtactagaatctaatcaagtcattcattgtacgaactgccggacaacactcatgtatccttatggagcttcctcagtaaaatgtgcaatttgtcgctatattactaatgtcagtatgacgaatggaaggcttccaattcctgtacagagaccaaatggaacagccaactctggaacagtatcttctacttcatcgtcaatgcctcattctcagagccaaactgtcgtagtagaaaatcccatgtctgttgattcgagtgggaaattggtgagcaatgttgttgtgggcgttacaacagagaagaaatgatacttgtcacattatcatgttatacaagtgtaaagagaacattatttgattcatcagctgctggtgctcaaagatattgttcgtatatgtgactttgcagcatagaagttaaaaatatttttgttctaaacgacatttagactgatttaatttacgtatatgaatacgaggacaagtggaaagggcacaaaacttgtcatttgtgcaattgcctaggtcctctttttgctgtagttggatcacagggtttttcacatctcgaattacaagtcgtagatgcacatttgtttcc

SEQ ID NO: 346 - protein, 176 aa, Glycine max
  misc_feature: Ceres CLONE ID no.1609278
  misc_feature: Bit score of 364.7 for HMM based on sequences of FIGURE 11.
  misc_feature (46)..(70): Pfam Name: zf-LSD1 Pfam Description: LSD1 zinc finger
  misc_feature: Functional Homolog Of Ceres SEEDLINE ID no. ME03047 at SEQ ID NO. 316
MGSQLVCNGCRNILVYPRGATNVCCALCNTVTSVPPPGMDMSQLYCGGCTTLLMYTRGATSVRCSCCHTINLVPVLESNQVIHCTNCRTTLMYPYGASSVKCAICRYITNVSMTNGRLPIPVQRPNGTANSGTVSSTSSSMPHSQSQTVVVENPMSVDSSGKLVSNVVVGVTTEKK

SEQ ID NO: 347 - DNA, 933 bp, Glycine max
  misc_feature: Ceres CLONE ID no.513085
  misc_feature: Encodes the peptide sequence at SEQ ID NO. 348
aaaatcaaaatattgaaaagccgcgagggaggtttcgtttcgtttcgttcagttcacacattctattctctatcgattcctcttccctttttctcaatccactacaccacagttatgaggagccaacttgtgtgtaatgggtgtaggagcatcttggtttaccctagaggagcaaccaatgtttgctgtgcgttgtgcaacaccattacctctgttcctcctcctggaatggacatgtcacaactctattgtggaggctgtacgacattgctaatgtacacacgtggtgctacaagtgtgagatgttcctgctgtcacactattaaccttgtaccagaatctaatcaagtcattcattgtgcgaactgccggacaacactcatgtatccttatggagcttcctcagtcaaatgtgcaatttgttgctatattactaatatcagtatgaccaatggaaggctttcaattcctgtacagagaccaaatggaacagccaactctggaacagtatcttcaacttcatcgtcaatgccttattctcagagccaaactgtcgtagtagaaaatcctatgtctgttgattcgagtgggaaattggtgaggaatgtcgttgtgggcgttacaacagataagaaatgatacttgccacatgaaaatgttacacaagtgtaaagggaacatcatttgactcgtcaactgctggtgcttgaaaatattgttcgtgtatatgaaattgcagcttataagttaaagatatttttgttctaaatgagatttagactgatttaatttacatatatgtatacgaggaccagtggaaagggcacacaacttgtcatttattgaattgccaaggtcctctttttgctgcagttgtatcacagggtttttcgcatctcgaattacaagtcctagatgcacatttgattcctc

SEQ ID NO: 348 - protein, 174 aa, Glycine max
  misc_feature: Ceres CLONE ID no.513085
  misc_feature: Bit score of 355.4 for HMM based on sequences of FIGURE 11.
  misc_feature (46)..(70): Pfam Name: zf-LSD1 Pfam Description: LSD1 zinc finger
  misc_feature: Functional Homolog Of Ceres SEEDLINE ID no. ME03047 at SEQ ID NO. 316
MRSQLVCNGCRSILVYPRGATNVCCALCNTITSVPPPGMDMSQLYCGGCTTLLMYTRGATSVRCSCCHTINLVPESNQVIHCANCRTTLMYPYGASSVKCAICCYITNISMTNGRLSIPVQRPNGTANSGTVSSTSSSMPYSQSQTVVVENPMSVDSSGKLVRNVVVGVTTDKK

SEQ ID NO: 349 - DNA, 936 bp, Gossypium hirsutum
  misc_feature: Ceres CLONE ID no.1854266
  misc_feature: Encodes the peptide sequence at SEQ ID NO. 350
aaaaaggaaaagaaaagggagcatattttcgaatttcgcggatctcatcgcatcgtattttgcaaaaatatcacagcatctaatttccttttgaataacatattaataatttatttttcttatattcaattcctccgccttcttcaaggaattttaactctcaattcgatagctcatcaaagaattggaattggttcctagttgaaggtggtgaaatcggatatgcatagccagcttatctgtactgggtgtcggagcattcttctttatcctagaggtgctaccagtgtttgctgtgcattatgcaatacaattactccccctgggatggaaatggctcaactcatatgtggaggttgtcgaacattgctaatgtatacacgtggagcagcaagtataagatgctcttgctgtcacaccattaatgttgcaccagcatccaaccagatttctcacatcacttgcgggcactgccgtacaactttaatgtatccatatggagctccatcagtcaaatgtgctgtctgtcaatatgttactaatgttggtatgggcaatgtaagggttccccttcccgtaaacagacctaatgggaaagctgccacagggtctatggctacgccatctgcttcgccaagccaaactgttgttgttgagaaccccatgtctgttgacgagagtgggaaattggtgagcaatgtcgtggttggcataacaactggcaaaaaatgaataatccagtgtggtacttgagtttgattgttgaggaattgattgtgtatatcaagttgaaactggcaaaaccattagcattgtattcgaagggataatgtgtgatgtacatctattagtgtacgaattgatggagatggaaagtctcatttatatgatttttaaagtgaaattaataataccgaatgtgtactttcatcttac

SEQ ID NO: 350 - protein, 169 aa, Gossypium hirsutum
  misc_feature: Ceres CLONE ID no.1854266
  misc_feature: Bit score of 349.8 for HMM based on sequences of FIGURE 11.
  misc_feature (81)..(105): Pfam Name: zf-LSD1 Pfam Description: LSD1 zinc finger
  misc_feature: Functional Homolog Of Ceres SEEDLINE ID no. ME03047 at SEQ ID NO. 316
MHSQLICTGCRSILLYPRGATSVCCALCNTITPPGMEMAQLICGGCRTLLMYTRGAASIRCSCCHTINVAPASNQISHITCGHCRTTLMYPYGAPSVKCAVCQYVTNVGMGNVRVPLPVNRPNGKAATGSMATPSASPSQTVVVENPMSVDESGKLVSNVVVGITTGKK

SEQ ID NO: 351 - protein, 169 aa, Gossypium hirsutum
  misc_feature: CERES CLONE ID no.100010372
  misc_feature: Bit score of 342.7 for HMM based on sequences of FIGURE 11.
  misc_feature (81)..(105): Pfam Name: zf-LSD1 Pfam Description: LSD1 zinc finger
  misc_feature: Functional Homolog Of Ceres SEEDLINE ID no. ME03047 at SEQ ID NO. 316
MQSQLICSGCRSILLYPRGATSVCCSLCNTITPPVMEMAQLICGGCRTLLMYTRGAASIRCSCCHTINVAPASNQISHITCGHCRTTLMYPYGAPSVKCAVCQYVTNVGMGNVRVPLPVNRPNGKAATGSMATQSASPSQTVVVENPMSVDESGKLLSNVVVGITTGKQ

SEQ ID NO: 352 - DNA, 843 bp, Gossypium hirsutum
  misc_feature: Ceres CLONE ID no.1932709
  misc_feature: Encodes the peptide sequence at SEQ ID NO. 353
attgaagagaggaaaaacgtaaatttacaggattcctaatttacgcggatctcatcatatttgtaaatttcccccttttcagaacatttttcttttcccctgatttcaacctatccgccttcttcaaggagctttaagtctcaagtcgtttgctccttgaaagatcggaattggtttcttgttgaaggaggtgaattcggatatgcagagcgaggtcgtttgtagtcggtgtaggaacattcttctttatcctagaggggctacaaatgtgtgctgtgcattgtgcaatacaattacccaagtccctcctcctggaatggaaatggctcaactcgtatgtggagggtgtcgaacattgctaatgtatacatgtggagcaacaagtgtaagatgctcttgctgtaacatcattaaccatgtgacagcatccaacccgatggctcacatcaactgcgggcactgccgtacaacactgatgtatccatatggagctccatcagtcaaatgtgctgtctgtcattatgttactaatgttggtacgggtaatgtaaggtgtccacttccggcaagcagaccgaatgccacagggactatgccatctacttcaacaagccaaacagtagtagttgagaatcccatgtcagttgatgagagtggcaaattggtgagcaatgtggtggttggcataacaacagacaaaaaatgatccaatgctgctttttttcttttctttgttctttttttggatttcattggaggagaatgcaaacaaacatggttatgaatgcagcgccattagtggtgtatattatattgaaaatggaaatcataaacactttgttc

SEQ ID NO: 353 - protein, 167 aa, Gossypium hirsutum
  misc_feature: Ceres CLONE ID no.1932709
  misc_feature: Bit score of 376.6 for HMM based on sequences of FIGURE 11.
  misc_feature (84)..(108): Pfam Name: zf-LSD1 Pfam Description: LSD1 zinc finger
  misc_feature: Functional Homolog Of Ceres SEEDLINE ID no. ME03047 at SEQ ID NO. 316
MQSEVVCSRCRNILLYPRGATNVCCALCNTITQVPPPGMEMAQLVCGGCRTLLMYTCGATSVRCSCCNIINHVTASNPMAHINCGHCRTTLMYPYGAPSVKCAVCHYVTNVGTGNVRCPLPASRPNATGTMPSTSTSQTVVVENPMSVDESGKLVSNVVVGITTDKK

SEQ ID NO: 354 - DNA, 525 bp, Populus balsamifera subsp. trichocarpa
  misc_feature: Ceres ANNOT ID no.1494788
  misc_feature: Encodes the peptide sequence at SEQ ID NO. 355
atgcaaagccaggtggtgtgtagagggtgtgcaagtgtattgttatatccaagtggagcttctaacgtttgttgtgctttatgtagtactgttacttccattccttctcctgggatggacatggctcaactcatatgtagaggttgcaggtcattgctaatgtatccacatggggcaacaactgtgagatgctcctgctgccacgtagtgaacattgcaccaggatataaccaggccgctcatgtcaactgtgggaactgccggactgctcttatgtatccaaatggatctccatctgtcaagtgtcctgtctgtcactatgttactaatgttagtatggctaacatgagaattccgcttccagcaaacagacctaatggtataggtggaacagcaccatctacttcaatgccattgccccattctcagactcaaactgtcgttgtggaaaaccccatgtctgttgatgaaagtggcaaattggtcagcaatgttgttgtcggtgtcactacagaaaaaaaataa

SEQ ID NO: 355 - protein, 174 aa, Populus balsamifera subsp. trichocarpa
  misc_feature: Ceres ANNOT ID no.1494788
  misc_feature: Bit score of 394.6 for HMM based on sequences of FIGURE 11.
  misc_feature (46)..(70): Pfam Name: zf-LSD1 Pfam Description: LSD1 zinc finger
  misc_feature: Functional Homolog Of Ceres SEEDLINE ID no. ME03047 at SEQ ID NO. 316
MQSQVVCRGCASVLLYPSGASNVCCALCSTVTSIPSPGMDMAQLICRGCRSLLMYPHGATTVRCSCCHVVNIAPGYNQAAHVNCGNCRTALMYPNGSPSVKCPVCHYVTNVSMANMRIPLPANRPNGIGGTAPSTSMPLPHSQTQTVVVENPMSVDESGKLVSNVVVGVTTEKK

SEQ ID NO: 356 - protein, 172 aa, Oryza sativa subsp. japonica
  misc_feature: Public GI ID no.115489526
  misc_feature: Bit score of 381.7 for HMM based on sequences of FIGURE 11.
  misc_feature (85)..(109): Pfam Name: zf-LSD1 Pfam Description: LSD1 zinc finger
  misc_feature: Functional Homolog Of Ceres SEEDLINE ID no. ME03047 at SEQ ID NO. 316
MQSQIVCHGCRNILLYPRGAPSVCCAVCHAVSSTAPSPGMDIAHLICGGCRTLLMYTRNATSVRCSCCDTVNLVRPVSSIAHLNCGQCQTVLMYPYGAPSVKCAICNFITNTGMNTMRHLPPNGTSYTAPSTSAPTTQSQNVTVVVENPMTVDAKGKLVSNVVVGVTTGGKK

SEQ ID NO: 357 - protein, 186 aa, Oryza sativa subsp. japonica
  misc_feature: Public GI ID no.115454273
  misc_feature: Bit score of 339.7 for HMM based on sequences of FIGURE 11.
  misc_feature (86)..(110): Pfam Name: zf-LSD1 Pfam Description: LSD1 zinc finger
  misc_feature: Functional Homolog Of Ceres SEEDLINE ID no. ME03047 at SEQ ID NO. 316
MQSQIVCHGCRSVLRYPSGAPSVCCALCQAITTVPPPAPVMEMAHLICGGCRTLLMYTRNADTVRCSCCSTVNLVRPVNNIAHVSCGQCRTTLMYPYGAPSVKCAICHYITNTGMNTVAPTPSPMPTSSGSSYNAPPSGSSYNAPPPTSAPTSRPQNVTVVVENPMTVDEKGKLVSNVVVGVTTGK

SEQ ID NO: 358 - DNA, 1142 bp, Triticum aestivum
  misc_feature: Ceres CLONE ID no.579413
  misc_feature: Encodes the peptide sequence at SEQ ID NO. 359
gtcaataagtttttctccgccattttccccgtcctccgcgagaagcgcctcgaggtccccgtgtgcggctagctagatcggtggcgcctcccctccctcctcccccgcggaaggcgctcgcccccttcattcccggaaccgattctcgcaagggattcctcgctgctcggctcttcttgaggcatgcagagccagatcgtgtgccatgggtgcaggagcgttctactctaccccagaggggcccccagcgtgtgctgcgccgtgtgccacgccgtcaccagcgcgccgcctccaggaatggagatggctcagcttatatgcgtcggctgtcgaactttattgatgtatactcgcaatgcaactactgtcagatgctcatgttgtgatacagtcaaccttgccagaccagcaccgccagtgaatagtatagctcatgtgaactgtggccagtgccagacggtgttaatgtatccatacggagcatcttctgtcaaatgtgctatctgcaattttattacgaacatcggaatgaacaccgtgagacctttgccacctacaatgcatgcaccaaacggaatttcatatagtgtcccatcgacctctgcgccatccgctcaatcgcagaatgtaacggtggtcgtcgaaaacccaatgacagtagatgacaagggaaaattggtgagcaacgtcgtagtcggggttacgtccggcgggaaaaagtagcaaaacatgtcagcgcttgtaccaagtgatgccctgttctgtgtcttataatctggagttgggaacactttgtattatactcgtgtctggtgatcgaccgatcggtcgcatagaagaaaaccccgaagcgcgtaaacggactgcgccaacaaaaaaagagagtgcgggtgtggataatacggaaaaaaactgtattttgcttaccccctagattcttttgtatgtaaaatgtgggcactgtcagacctcactgcgtgatcaaatcctctctgtcctgtcctgtgtcctgtcctggaggggcctctcgttctggatgaataacagcaaataactttgcatatggctggccccacctgtcaatgattggtaattaaacgactgtaattattgtgatgaataattctttgaaggctgtatat

SEQ ID NO: 359 - protein, 179 aa, Triticum aestivum
  misc_feature: Ceres CLONE ID no.579413
  misc_feature: Bit score of 386.7 for HMM based on sequences of FIGURE 11.
  misc_feature (87)..(111): Pfam Name: zf-LSD1 Pfam Description: LSD1 zinc finger
  misc_feature: Functional Homolog Of Ceres SEEDLINE ID no. ME03047 at SEQ ID NO. 316
MQSQIVCHGCRSVLLYPRGAPSVCCAVCHAVTSAPPPGMEMAQLICVGCRTLLMYTRNATTVRCSCCDTVNLARPAPPVNSIAHVNCGQCQTVLMYPYGASSVKCAICNFITNIGMNTVRPLPPTMHAPNGISYSVPSTSAPSAQSQNVTVVVENPMTVDDKGKLVSNVVVGVTSGGKK

SEQ ID NO: 360 - DNA, 1040 bp, Panicum virgatum
  misc_feature: Ceres CLONE ID no.1874905
  misc_feature: Encodes the peptide sequence at SEQ ID NO. 361
gccccagacaaatccaatccggaaccgactcccccctcgcttcgccggggagaggagggacgagcgacgccgcgcccgtccgcgtccgcgtccgtctgcccctcccgcgccgaccacttcccggagcgcggagacgggcgggcggtcatcccgctcaaaaacgccgcaggtatgcagagccagatcgtgtgccacgcgtgccggaccgttctgctctacccgcggggggcgcccagcgtctgctgcgcggtgtgccaggccgtcaccaccgtgccgccaccaggactagagatggctcagcttatatgtggtggttgtcgaactttgctgatgtatactcgaagtgcagacaccgtaaggtgttcatgttgcaatacagtcaatcttgttagaccagtgaataatatagctcatgttaactgcggccactgccagacaactttgatgtatccatatggagcacattcagtaaaatgtgccatatgcaatcatatcactaccactggagtaaatacggtggcacccacaccgtctgcaaggccagcatcaaatggatcttcatatagtacctcatctacttctgctcctaaatctcagccccagaatgtaactgttgttgttgagaaccctatgacagtagatgataagggaaaactagtgagcaacgttgtagttggagtcacaactgggaaaaactgatgtgctatctacatcattgttgtgtgttctatatcagaagctaggaaatattatgggtcacagtgctatcgagtggctggttgcatggtcgcccttgaccaaagatgcaccaaatgtttcttgtatcttgcaaggaaaccatgaaggtcaaaagctgtgttttgaatctattgattcttttgtgtgtataagagctcttttagacttcagtgtgtgatcagatagtagaggtgactgatagtatagtttcattatacatgcatatgtacacactttgtttgttagtttgtgctgtcttgttcataattttttgctggtatacacgcgctatgctcgtttcg

SEQ ID NO: 361 - protein, 175 aa, Panicum virgatum
  misc_feature: Ceres CLONE ID no.1874905
  misc_feature: Bit score of 375.1 for HMM based on sequences of FIGURE 11.
  misc_feature (84)..(108): Pfam Name: zf-LSD1 Pfam Description: LSD1 zinc finger
  misc_feature: Functional Homolog Of Ceres SEEDLINE ID no. ME03047 at SEQ ID NO. 316
MQSQIVCHACRTVLLYPRGAPSVCCAVCQAVTTVPPPGLEMAQLICGGCRTLLMYTRSADTVRCSCCNTVNLVRPVNNIAHVNCGHCQTTLMYPYGAHSVKCAICNHITTTGVNTVAPTPSARPASNGSSYSTSSTSAPKSQPQNVTVVVENPMTVDDKGKLVSNVVVGVTTGKN

SEQ ID NO: 362 - DNA, 1000 bp, Zea mays
  misc_feature: Ceres CLONE ID no.895962
  misc_feature: Encodes the peptide sequence at SEQ ID NO. 363
accgcagcgtctcgactggtcccctccttcctcttctcttcctcttcctctcacatcccggacaaatccaatccgaaatcatctccccctcgcctcgcctagaagaggaaggaagaacagagataagcgacaacgcgtccctcctcgccttcctcccgcctcgagctcttcccggagcaaccggagccacagacgtcaggacagcctagcgcgttccacgccggtatgcagaaccagatcatgtgccatgcttgccggacccttctgctctacccgcgtggcgcgtccagcgtctgctgcgcggtttgccaggccatcaccaccgtgccgccaccaggattggagatggctcagcttatatgtggtggctgtcgaactttgctgatgtatactcgcagtgcagacaccgtaaggtgttcatgttgcaacacagtgaaccttgttagaccagtgaataatatagctcatgtgaactgcggccagtgccggacaactttgatgtatccatacggcgcaccttcagtaaaatgtgccgtatgcaattatgtcacagctactggagtaaatactgtggcacccaccccatctgcgaggccaacatcagatgggtcttcatatagtggctcatctacttctgctcctaaatctcaatctcagaatgtaactgttgttgttgagaaccctatgacagttgatgacaagggaaaacttgtcagcagcgttgtagttggagtcacagctgggaaagagtgattttattgacacttcgtacatcattgttgtgttttctatacacgaagttggaaaataccatgtagcatccaatgatgggttgcttggacttccttgaagaacagagatacaccacgaaatatttgtaggaccttcctaatgaaaccatggtcggacgttgtgtattgattcttttgtgtgtataatatgagctccgttagacttgtgtaatcagatatttgggggaaatacagcatagtttcgctgt

SEQ ID NO: 363 - protein, 175 aa, Zea mays
  misc_feature: Ceres CLONE ID no.895962
  misc_feature: Bit score of 362.4 for HMM based on sequences of FIGURE 11.
  misc_feature (84)..(108): Pfam Name: zf-LSD1 Pfam Description: LSD1 zinc finger
  misc_feature: Functional Homolog Of Ceres SEEDLINE ID no. ME03047 at SEQ ID NO. 316
MQNQIMCHACRTLLLYPRGASSVCCAVCQAITTVPPPGLEMAQLICGGCRTLLMYTRSADTVRCSCCNTVNLVRPVNNIAHVNCGQCRTTLMYPYGAPSVKCAVCNYVTATGVNTVAPTPSARPTSDGSSYSGSSTSAPKSQSQNVTVVVENPMTVDDKGKLVSSVVVGVTAGKE

SEQ ID NO: 364 - DNA, 471 bp, Populus balsamifera subsp. trichocarpa
  misc_feature: Ceres ANNOT ID no.1467173
  misc_feature: Encodes the peptide sequence at SEQ ID NO. 365
atgcagagccaggtggtgtgtagagggtgtagaagtttattgttatatccaagtggagctactaatgtttgttgtgctttatgtagtaccgttacctctattcctgctcctgggatggacttggctcaactcatatgtcgaggttgcaggacattgctaatgtatgcacggggggcaacaactgtgagatgctcctgctgccacatagtgaactttgcaccaggacctaaccaggttgctcatgtcaactgtgggaactgccagactacacttatgtatccgaatggtgctccatctgtcaagtgtgcggtctgtcactatgttactaacattagtacggctaatgtgagagttccgcttccagcaaacagacctagtggtataggtggaacaatgccgtctacttcaacaactcaaactgtcgttgtggaaaaccctatgtctgttgatgaaagtggcaaattggtataa

SEQ ID NO: 365 - protein, 156 aa, Populus balsamifera subsp. trichocarpa
  misc_feature: Ceres ANNOT ID no.1467173
  misc_feature: Bit score of 318.6 for HMM based on sequences of FIGURE 11.
  misc_feature (84)..(108): Pfam Name: zf-LSD1 Pfam Description: LSD1 zinc finger
  misc_feature: Functional Homolog Of Ceres SEEDLINE ID no. ME03047 at SEQ ID NO. 316
MQSQVVCRGCRSLLLYPSGATNVCCALCSTVTSIPAPGMDLAQLICRGCRTLLMYARGATTVRCSCCHIVNFAPGPNQVAHVNCGNCQTTLMYPNGAPSVKCAVCHYVTNISTANVRVPLPANRPSGIGGTMPSTSTTQTVVVENPMSVDESGKLV

SEQ ID NO: 366 - DNA, 1059 bp, Zea mays
  misc_feature: Ceres CLONE ID no.1447813
  misc_feature: Encodes the peptide sequence at SEQ ID NO. 367
ctcaacctctcgtccggccgtgttgacctgaccgaataaccacccgtctgccgctgtgccgcaccccgcacgagacccgtccttgaggggcacgtcctagatcggtggcgcctgcctctcgccgccgatacggtgcctctcgcggtctcgctccccctcgcaggtcttttggtttttttagttcctccctttgcttcttggaggtgtttgttgccgtctcacccgcagttcttgagacatgcagagccagatagtgtgccacgggtgcaggacccttctgttctacccaagaggtgctccgagcgtgtgttgtgcggtatgccatgtggtcaccaatgtgccgcctccagcaatggagatggctcgacttatatgtggtggctgccagacattattgatgtatgctcgcagtgcaacaactgtaagatgctcatgttgtgacacagtcaatcttgtcagaccagtgagtagcatagctcatgtgaactgtggccagtgccaaacagtgttgatgtatccatacggagcaccgtctgtcaaatgtgctgtttgcaacttcattacaaatgttggcggggtgactcccatgatacctttgccaccaccagcactaactgcatcaagtggaacttcatatatcatcccgtcaatttccgtgccgacgaatcaaccgcggaatgtaactgttgtcgttgaaaacccaatgacagtagatgacaagggaaaattggtgagcaatgttgtagtaggggttacgagcggcgggaaaaagtgacggcatatcacaacccgtatagctttgtccaaactatctaaaaagggtttaagaatacataccttgtatcatactgctgtttggcgatcggctgctcgacggaggaatccccctccctggagagcgtagtggcaaggcagcgctgctttcgccactgcgatcgtgctagaacgagccaaaaaaaaaaacgaagtgcgggtgtgcatactcagagtatatctgtagcttgttaccccttgattcttttgtatgtaatatgggctctgcctgactttcactgtgtg

SEQ ID NO: 367 - protein, 178 aa, Zea mays
  misc_feature: Ceres CLONE ID no.1447813
  misc_feature: Bit score of 346.7 for HMM based on sequences of FIGURE 11.
  misc_feature (84)..(108): Pfam Name: zf-LSD1 Pfam Description: LSD1 zinc finger
  misc_feature: Functional Homolog Of Ceres SEEDLINE ID no. ME03047 at SEQ ID NO. 316
MQSQIVCHGCRTLLFYPRGAPSVCCAVCHVVTNVPPPAMEMARLICGGCQTLLMYARSATTVRCSCCDTVNLVRPVSSIAHVNCGQCQTVLMYPYGAPSVKCAVCNFITNVGGVTPMIPLPPPALTASSGTSYIIPSISVPTNQPRNVTVVVENPMTVDDKGKLVSNVVVGVTSGGKK

SEQ ID NO: 368 - DNA, 1632 bp, Zea mays
  misc_feature: Ceres CLONE ID no.382659
  misc_feature: Encodes the peptide sequence at SEQ ID NO. 369
gaccgaataaccacccgtctgccgctgtgccgcacggcccgcaccccgcacgagacccgtccttgaggggcacgtcctagatcggtggcgccttcctctcgccgccgatacggtgcctctcgcggtctcgctccccctcgcaggtcttttggtttttttagttcctccctttgcttcttggaggtgtttgttgccgtctcacccgcagttcttgaggtacgcacgcagtaatccggcttctttctatgttccgatgtcttgctggttggatgaggagggtacgacgctctgtggagagatctaatcgcgctggtaaactggggcgatcggtgtgggggaatcggatagcgtggatgggatttgggattggaagagaagctggaggatgccttttttctggatgacggtgataatcgtggacgagctaagctcattgagtgtctggctgatgtgggattgggtggcatatgctggattgctaactgttccatctggtgcaccaagaattggactgcactggggttgggattgggattgggatgggattgctttgcctttgattgtgtatatgcttattatgtgctcatccgctgtggctttggccggaactttgcagacatgcagagccagatagtgtgccacgggtgcaggacccttctgttctacccaagaggtgctccgagcgtgtgttgtgcggtatgccatgtggtcaccaatgtgccgcctccagcaatggagatggctcgacttatatgtggtggctgccagacattattgatgtatgctcgcagtgcaacaactgtaagatgctcatgttgtgacacagtcaatcttgtcagaccagtgagtagcatagctcatgtgaactgtggccagtgccaaacagtgttgatgtatccatacggagcaccgtctgtcaaatgtgctgtttgcaacttcattacaaatgttggcggggtgactcccatgatacctttgccaccaccagcactacctgcatcaagtggaacttcatatatcatcccgtcaatttccgtgccgacgaatcaaccgcggaatgtaactgttgtcgttgaaaacccaatgacagtagatgacaagggaaaattggtgagcaatgttgtagtaggggttacgagcggcgggaaaaagtgacggcatatcacaaccgtgtgtagctttgtccaaactatctaaaaagggtttaagaatacataccttgtatcatactgctgtttggcgatcggctgctcgacggaggaatccccctccctggagagcgtagtggcaaagcagcgaggctttcgccactgcgaacgagccaaaaaaaaacgaagtgcgggtgtgcatactcagagtatatctgtagcttgttaccccttgattcttttgtatgtaatatgggctctgcctgactttcactgtgtgatcaaatttccaagcccgtgggcgctgttgctgcgtgccttgttattagtgaataacaaacattgcaaatggctcttgaaatacagtgtgtgtgtgttttaatctctctgcatttatgttaatcagcaggtgccaccatttgctgttccagactgataatgcagagtttgtatccacgttctttggagaaaacatttgaggcgc

SEQ ID NO: 369 - protein, 178 aa, Zea mays
  misc_feature: Ceres CLONE ID no.382659
  misc_feature: Bit score of 347.4 for HMM based on sequences of FIGURE 11.
  misc_feature (84)..(108): Pfam Name: zf-LSD1 Pfam Description: LSD1 zinc finger
  misc_feature: Functional Homolog Of Ceres SEEDLINE ID no. ME03047 at SEQ ID NO. 316
MQSQIVCHGCRTLLFYPRGAPSVCCAVCHVVTNVPPPAMEMARLICGGCQTLLMYARSATTVRCSCCDTVNLVRPVSSIAHVNCGQCQTVLMYPYGAPSVKCAVCNFITNVGGVTPMIPLPPPALPASSGTSYIIPSISVPTNQPRNVTVVVENPMTVDDKGKLVSNVVVGVTSGGKK

SEQ ID NO: 370 - DNA, 995 bp, Arabidopsis thaliana
  misc_feature (1)..(995): Ceres Promoter YP2683
caatcggtcgcgaaagacttgatctaggtagagatatacttaattaaaatcgatgaatgaccaagtcaataaatcaagattcaatgttctttcgacgaattctgttcattttgcggttgggatcatgcattcatttaaaataaaccattattgaatacgttatggataatgatagtgattaattatccaatgaggaagagatttggttggattgttttggagagtaataataaaaaataaaggcatgcaatagaaggggcagaccaagtggaatattctgtctaccacaacgaagtttcaatcaaagatatcagaggttaatgtcttccaataagcgaccaaaaatcttgattaataattaattatatcgcccaaagtcactatgaacttgtgaacgtgttattttggagacttttctcacctaaatacatcgagatcgccttgttagttggtacttggtaaacattatgctctaatggctttggttgttattgacgaacatacaatgtaatgaatattttctcaattgagttgtttcatttctaacaaaactagaaactaaaacaaggaaggcgatgtttctcacatgaaatttacatacacgcaatgaaaaccaaaccgactaaattttgtgtttttttcagggtgatttttaagaacattccttaatcaatgggatctaaaaaagtcacttgcctaagaaagtcaccgaaacttcacattcaaagtaactttatcctcttctcagcttttcacattatgaacctcccgtgggaacaaagacatttatacccttacgtgagcttccaagaagaaaccaacaatttttaagatttttccccattacatgtagattagttggcttcaagtttctatggatgttccttctcggaaatccataattctcttcctttatatataaaacttactcacaacacaaaacccatctctcaaaacaatcaatttctctcaaactgttttactttctctttgta

SEQ ID NO: 371 - DNA, 959 bp, Arabidopsis thaliana
  misc_feature (1)..(959): Ceres Promoter YP2816
cagtcgtgtttttgccgtttatggttttataattttataaaatgatttatacttgttggtttttatttgtaatttttcctgtaagggggaaatttattttttatacagctaataaatgataaaaactcgaaaattgtgactacagtggaagagtttggtggcagacatttacttgttgtctgaagaagaaattcaatgcaatgactaatctgaaattacactagaatcaaataaagctttacctaatgtaattaaatttctacagagttggtggcttatgaaagataatctaaggagattttgatgctctgtattttcaaattttagatgttggccataaagtaaaatttatttatacttccacactcaatccccattttcagtattacttcaagtcttcgacatactttattctgtaagttttttttttggcatcaaaaagtgtgaaaataaaagtatcattttcttattgaatgatgaatacttatgaaaaagaaaagcaaactttatgacgaataaagcctgaaactgtgttgtaaacaaagtctaaaacgaatgatttttattttctcgtcaagtaatcattttatttttattgatgatttttgatacttcacataatacttttgatattaggccagttaggaataaattttcaaatactttgatctttctttgttgaacttgagcggttcgtacgaacatgctttgatctttttgcatttacttatgaataaagcaaaaacttctaaactgtttctatttaatagattggaactcgagtcggtgtacattgaaaaaataaaccaaaatttaataacagagattatttgccttttaatacatatacacacacgcacatatctacctgcatcttcttcataatcattcctaagaaattctctctctcacacactcaagaacaagacaagagtcaagaaaaatcagccatgcactga

SEQ ID NO: 372 - DNA, 993 bp, Arabidopsis thaliana
  misc_feature (1)..(993): Ceres Promoter YP2832
tcaaaaaataaaaatttgagtcgttgctcgtcagattttatgtcactagacagcaacgaaaacaagcacataataatcaaaaccgtagcagaaaatgccaatcaaaggtaaattatggttcatggaggcaatttgcaaacaatgattaggattgtgtcatactgtagaaaaaattaacaaaacaatttttttattattcattgactcgaaggttgaacaagaaggtcgaaaaaataaacatctttacatgggggttcatattatttatgtacaaattgctaccaaggacaaagatcacatgctcatctacaacgataagatcaatgaatttgacagtatattaataaatcatgcatctatacataaataaaaactagtaggaactagtctagtcaaaaagtacagtattatggacaagatatgaaactagctaggataatactaattgctgtagcttaagccacttgaatgttgtccctcattattatgtccaaaaaattcaatgtagacaagaaaaaagaactaatactaatatatgtcttgccacgattgttactttaatctcatttttcaaatattatggtctcatatagccaaatctgtaattcttatattccagtacgtatggagagactcgggagagtcgaaccaagaacatgctcaggccttctgagttgtgacatagatagtacaaccaggcgaccgagacaaacaaaaccatgttatttgtaatgaattataatgatccaatcttgaccacacacaaagaaaagtctgataataatgaaacaaatgagcatgcaaagtatgtgacgacgtggcaaaaaatgagaaggttcaacgaagcaacaaaaagaagtatttcgtcgtctttactcccatcaatatgtgactataaataaaaccatatagttaagtcacacttccatgtcaacgtgcttcaacctatgtaaagctaaaaaaaaaacacatcacacaaaagatctctacact

SEQ ID NO: 373 - DNA, 734 bp, Arabidopsis thaliana
  misc_feature (1)..(734): Ceres Promoter PT0839
aactcctagcctaaaactaaaacacagttgatgactaattggtggagaaccattaaaaaaaaaaaaaaaagacagagtagactaacgaaaccacacctttacatttttctatttatctcaccttcctaaataaaaaatatttattttaaacaaaaacacattttctgtacagacgtgggtttcgtaatgtccataagtccatccgtagtctaccatataatttaacatctacttctctccagtggacgcaaaagcttcgaattgaatgtgggcgttgcttctctcgtgtctaatataaaatttggataatcatgaattcttcgatgatagtgatataccgttgacactgagtagttcattgcaataagtaagatcttgtttttgctaaaaagattcaatcatattttgaacacttgccacccaccacttccaaaacttccacaaattcatagatatagtaatacacaggttacttgacaaaaggaataaaagtacaatatgatgctttacacattctcagtcaaaaaaaacgataaaatgaatgtgtaagataatattgtttaaaaaagaaaaaaagaacaaaaaaaagataatattgttttcccgacgactaatccacattcagtattttataaaataactgaactcaagttgctcgatcaaacaagtacccttaaatgtctctctgtctatataaatgtacactcttcccaaacaaaaccatatctcaaaat

SEQ ID NO: 374 - protein, 199 aa, Oryza sativa subsp. japonica
  misc_feature: Public GI ID no.125580039
  misc_feature: Bit score of 375.5 for HMM based on sequences of FIGURE 11.
  misc_feature (112)..(136): Pfam Name: zf-LSD1 Pfam Description: LSD1 zinc finger
  misc_feature: Functional Homolog Of Ceres SEEDLINE ID no. ME03047 at SEQ ID NO. 316
MQSQIVCHGCRNILLYPRGAPSVCCAVCHAVSSTAPSPGCKHWPEFAGSAEGLGQHDFIRIGGFTGMDIAHLICGGCRTLLMYTRNATSVRCSCCDTVNLVRPVSSIAHLNCGQCQTVLMYPYGAPSVKCAICNFITNTGMNTMRHLPPNGTSYTAPSTSAPTTQSQNVTVVVENPMTVDAKGKLVSNVVVGVTTGGKK

SEQ ID NO: 375 - protein, 207 aa, Zea mays
  misc_feature: CERES CLONE ID no.100870568
  misc_feature: Bit score of 319.5 for HMM based on sequences of FIGURE 11.
  misc_feature (99)..(123): Pfam Name: zf-LSD1 Pfam Description: LSD1 zinc finger
  misc_feature: Functional Homolog Of Ceres SEEDLINE ID no. ME03047 at SEQ ID NO. 316
  misc_feature (162)..(162): Xaa is any aa, unknown, or other
  misc_feature (166)..(166): Xaa is any aa, unknown, or other
  misc_feature (172)..(172): Xaa is any aa, unknown, or other
  misc_feature (173)..(173): Xaa is any aa, unknown, or other
  misc_feature (175)..(175): Xaa is any aa, unknown, or other
  misc_feature (181)..(181): Xaa is any aa, unknown, or other
  misc_feature (184)..(184): Xaa is any aa, unknown, or other
  misc_feature (185)..(185): Xaa is any aa, unknown, or other
  misc_feature (189)..(189): Xaa is any aa, unknown, or other
  misc_feature (190)..(190): Xaa is any aa, unknown, or other
  misc_feature (195)..(195): Xaa is any aa, unknown, or other
  misc_feature (197)..(197): Xaa is any aa, unknown, or other
  misc_feature (198)..(198): Xaa is any aa, unknown, or other
  misc_feature (199)..(199): Xaa is any aa, unknown, or other
MRRVRRSVERSNRADMQSQIVCHGCRTLLFYPRGAPSVCCAVCHVVTNVPPPAMEMARLICGGCQTLLMYARSATTVRCSCCDTVNLVRPVSSIAHVNCGQCQTVLMYPYGAPSVKCAVCNFITNVGGVTPMIPLPPPALTASSGTSYIIPSISVPTNQPRXVTVXVENPMXXDXKGKLVXNVXXGVTXXGEKVXAXXXPYSFVQTF

SEQ ID NO: 376 - DNA, 756 bp, Populus balsamifera subsp. trichocarpa
  misc_feature: Ceres ANNOT ID no.1441897
  misc_feature: Encodes the peptide sequence at SEQ ID NO. 377
atgagaattcataccgttgacagagaggaagaggaagatagacagagagagatgcaaagccaggtggtgtgtagagggtgtgcaagtgtattgttatatccaagtggagcttctaacgtttgttgtgctttatgtagtactgttacttccattccttctcctggagatggttgttttgaagaattgttgatcgaaaagagtttcgtcgaagttgttgcacttaatgtagtttgccacagtgtggcggacaaattggattgtttctgcatggtggagtgccatctaagatccgccatggatttgagaataggaatgcataatcctgggatggacatggctcaactcatatgtagaggttgcaggtcattgctaatgtatccacatggggcaacaactgtgagatgctcctgctgccacgtagtgaacattgcaccaggatataaccaggccgctcatgtcaactgtgggaactgccggactgctcttatgtatccaaatggatctccatctgtcaagtgtcctgtctgtcactatgttactaatgttagtatggctaacatgagaattccgcttccagcaaacagacctaatggtataggtggaacagcaccatctacttcaatgccattgccccattctcagactcaaactgtcgttgtggaaaaccccatgtctgttgatgaaagtggcaaattgggacaatatgcgtatttgtacttctggaaccctagattcttgaagataaattctgtataa

SEQ ID NO: 377 - protein, 234 aa, Populus balsamifera subsp. trichocarpa
  misc_feature: Ceres ANNOT ID no.1441897
  misc_feature: Bit score of 325.7 for HMM based on sequences of FIGURE 11.
  misc_feature (100)..(124): Pfam Name: zf-LSD1 Pfam Description: LSD1 zinc finger
  misc_feature: Functional Homolog Of Ceres SEEDLINE ID no. ME03047 at SEQ ID NO. 316
MQSQVVCRGCASVLLYPSGASNVCCALCSTVTSIPSPGDGCFEELLIEKSFVEVVALNVVCHSVADKLDCFCMVECHLRSAMDLRIGMHNPGMDMAQLICRGCRSLLMYPHGATTVRCSCCHVVNIAPGYNQAAHVNCGNCRTALMYPNGSPSVKCPVCHYVTNVSMANMRIPLPANRPNGIGGTAPSTSMPLPHSQTQTVVVENPMSVDESGKLGQYAYLYFWNPRFLKINSV

SEQ ID NO: 378 - protein, 154 aa, Arabidopsis thaliana; identical to SEQ ID NO: 239
  misc_feature: Public GI ID no.18398482
  misc_feature: Bit score of 155.7 for HMM based on sequences of FIGURE 11.
  misc_feature (114)..(138): Pfam Name: zf-LSD1 Pfam Description: LSD1 zinc finger
  misc_feature: Functional Homolog Of Ceres SEEDLINE ID no. ME03047 at SEQ ID NO. 316

SEQ ID NO: 379 - DNA, 1220 bp, Arabidopsis thaliana
  misc_feature: Ceres CLONE ID no.26652
  misc_feature: Encodes the peptide sequence at SEQ ID NO. 380
aaacacacacatatacacccaaacgttatgtaactgcaaaaaaaatatcgaaacgagattctacaattagtctctagtcaaagagcttcatggcaatggtgtgaccccaaagttagtcttcacatgtttcttaagtttcaaacattgaatttttttccttttataaatagttaagacttatcttcattttctaaaatagtcaagatttatattcctcttaaaaaataatttatttccttcctaagaagaattattagatttattttctttgctagtatagattgatgaaagtgaggaaatgggagaagaaatgaagaacacaggatgtgtcttcttcttctaagtcactaacaaaatcaacaaagaggagaagccattattatataatagagagattgagagaagagatttatccaaaaaaatattgcaattcttcttggagtgaataatgccagtccctcttgcaccatatccaacacctccggcaccggcactggctccgtcgtacaacactcctccggcaaatggaagtacaagtgggcagagccagttagtgtgttcaggttgcagaaaccttctgatgtatcccgtcggagcaacctccgtctgttgcgccgtctgtaacgccgtcacggccgttcctccgcccggaacggagatggcacagttggtatgtggaggatgtcatacactcttaatgtacattcgtggagctacaagtgttcaatgttcttgttgtcacactgttaatctcgccctcgaagcaaaccaagtagcgcatgtgaattgcggaaactgcatgatgctactaatgtatcaatatggagcaagatcagtgaaatgtgccgtttgtaactttgtcacatctgttgggggttcaacgagcacgactgattcgaagtttaacaattaaaacttggatctatctacctatcaatacatattgagttatgagcaatatagaggaagcatcaaatctttttcactctctcttcgatcaagaatccggcagtgatgagtttgaaaccattttcggaagtaaatgaaatatgtaattcgtcgaaatttctgactttggtctctttgtccgtttgtatagagctatctctcttctttggtttttgttttgttctcttaagaaaaatttgattccccagtttgtaagagkgattcagaaatcaaagctagactttttatgcatgaaaaaaatagattgtttt

SEQ ID NO: 380 - protein, 154 aa, Arabidopsis thaliana
  misc_feature: Ceres CLONE ID no.26652
  misc_feature: Bit score of 154.2 for HMM based on sequences of FIGURE 11.
  misc_feature (114)..(138): Pfam Name: zf-LSD1 Pfam Description: LSD1 zinc finger
  misc_feature: Functional Homolog Of Ceres SEEDLINE ID no. ME03047 at SEQ ID NO. 316
  misc_feature (147)..(147): Xaa is any aa, unknown, or other
MPVPLAPYPTPPAPALAPSYNTPPANGSTSGQSQLVCSGCRNLLMYPVGATSVCCAVCNAVTAVPPPGTEMAQLVCGGCHTLLMYIRGATSVQCSCCHTVNLALEANQVAHVNCGNCMMLLMYQYGARSVKCAVCNFVTSVGGSTSXTDSKFNN

SEQ ID NO: 381 - DNA, 528 bp, Sorghum bicolor
  misc_feature: Ceres ANNOT ID no.6033586
  misc_feature: Encodes the peptide sequence at SEQ ID NO. 382
atgcagagccagatcgtgtgccatgcttgccggaccgttctactctacccgcgaggcgcgtccagcgtctgctgcgccgtttgccaggccatcaccaccgtgccgccaccaggactggagatggctcagcttatatgtggtggttgtcgaactttgctgatgtatactcgcagtgcagacaccgtaaggtgttcatgttgcaacacagtcaatcttgttagaccagtgaataatatagctcatgtgaactgcggccagtgccggacaactttgatgtatccgtatggcgcaccttcagtaaaatgtgccatatgcaattatgtcacgactaccggagtaaatactgtggcacccactccatctgcgaggccaacatcaaatgagtcttcatatattggctcatctacttctgctcctaaatctcaacctcagaatgtaactgttgttgttgagaaccctatgacagttgacgacaagggaaaacttgtcagcagcgttgtagttggagtcacagctgggaaagtgtga

SEQ ID NO: 382 - protein, 175 aa, Sorghum bicolor
  misc_feature: Ceres ANNOT ID no.6033586
  misc_feature: Bit score of 361.7 for HMM based on sequences of FIGURE 11.
  misc_feature (84)..(108): Pfam Name: zf-LSD1 Pfam Description: LSD1 zinc finger
  misc_feature: Functional Homolog Of Ceres SEEDLINE ID no. ME03047 at SEQ ID NO. 316
MQSQIVCHACRTVLLYPRGASSVCCAVCQAITTVPPPGLEMAQLICGGCRTLLMYTRSADTVRCSCCNTVNLVRPVNNIAHVNCGQCRTTLMYPYGAPSVKCAICNYVTTTGVNTVAPTPSARPTSNESSYIGSSTSAPKSQPQNVTVVVENPMTVDDKGKLVSSVVVGVTAGKV

SEQ ID NO: 383 - DNA, 534 bp, Sorghum bicolor
  misc_feature: Ceres ANNOT ID no.6074827
  misc_feature: Encodes the peptide sequence at SEQ ID NO. 384
atgcagagccagatcgtgtgccacgggtgcaggaccgttctgctctacccaagaggtgctccgagcgtgtgttgcgcggtatgccatgcagtcaccaatgtgccgcctccagcaatagagatggctcgacttatatgtggtggttgccagacattattgatgtatactcgcagtgcaacaactgtaagatgctcatgttgtgacacagtcaatcttgtcagaccagtgagtagcatagctcatgtgaactgtggccagtgccaaacagtgttgatgtatccatatggagcaccgtctgtcaaatgtgctatttgcaacttcattacaaatgttggcggggtgactccggtgagacctttgccacctgcactacctgcatcaagtggaaattcatatagcatcccgtcaacttctgtgccaatgaatcaatcgcagaatgtaactgttgttgttgaaaacccaatgacagtagatgacaagggaaaattggtgagcaatgttgtagtaggggttacaagtggtgggaaaaagtaa

SEQ ID NO: 384 - protein, 177 aa, Sorghum bicolor
  misc_feature: Ceres ANNOT ID no.6074827
  misc_feature: Bit score of 358.9 for HMM based on sequences of FIGURE 11.
  misc_feature (84)..(108): Pfam Name: zf-LSD1 Pfam Description: LSD1 zinc finger
  misc_feature: Functional Homolog Of Ceres SEEDLINE ID no. ME03047 at SEQ ID NO. 316
MQSQIVCHGCRTVLLYPRGAPSVCCAVCHAVTNVPPPAIEMARLICGGCQTLLMYTRSATTVRCSCCDTVNLVRPVSSIAHVNCGQCQTVLMYPYGAPSVKCAICNFITNVGGVTPVRPLPPALPASSGNSYSIPSTSVPMNQSQNVTVVVENPMTVDDKGKLVSNVVVGVTSGGKK

SEQ ID NO: 385 - DNA, 441 bp, Sorghum bicolor
  misc_feature: Ceres ANNOT ID no.6027418
  misc_feature: Encodes the peptide sequence at SEQ ID NO. 386
atgcatagccagttggtctgcggcggctgcaagcgtcttctccagtaccgcaggggagccaccggcgtctgctgcccaacctgcaacactttcacagccgccaacccatcaggaccggagatgtctgaactcgtctgtggcggctgcttcaccatgctggtgcactcccgcagcgccaccaacatacgctgccctcactgtagtaggctcaactccacaagatcaggaaaccaaatgggtcacctgtcatgcgggcaatgccggacaactctggcatacccaccgggagcgacgacagtcgggtgcccaacatgccgcaacattaatccagtcagggatgctcggccccagacggttctggtggagaatcctaagacactggatgaaaagggcaaactggtgagcaatgtcgccgttggtgtcacctcatggaaaagatga

SEQ ID NO: 386 - protein, 146 aa, Sorghum bicolor
  misc_feature: Ceres ANNOT ID no.6027418
  misc_feature: Bit score of 158.0 for HMM based on sequences of FIGURE 11.
  misc_feature (7)..(31): Pfam Name: zf-LSD1 Pfam Description: LSD1 zinc finger
  misc_feature: Functional Homolog Of Ceres SEEDLINE ID no. ME03047 at SEQ ID NO. 316
MHSQLVCGGCKRLLQYRRGATGVCCPTCNTFTAANPSGPEMSELVCGGCFTMLVHSRSATNIRCPHCSRLNSTRSGNQMGHLSCGQCRTTLAYPPGATTVGCPTCRNINPVRDARPQTVLVENPKTLDEKGKLVSNVAVGVTSWKR

SEQ ID NO: 387 - DNA, 1300 bp, Arabidopsis thaliana
  misc_feature: Ceres SEEDLINE ID no.ME03280
  misc_feature: Encodes the peptide sequence at SEQ ID NO. 389
aaaaaattactaaccatataagtctcagtactctctgttctgcaaacttcatacacaaaaccaacattaagagatggcgagtcactacagaaacacaagcgctattgcttatctattgctttgtctcttcattacatctgccactgcacattccttcatacgacaaatcactgatgacctcaaaacaaatctgcagcaggaaggtaggagcagaaccaatccaaaaccctggacgtgggacattacttacaagaaaataaggagatctcatcacgtgattataaagtatcagcttcaaacgcagtgaaaggtttgagagatcgtcctccatcgtcttactctctcaagatggagtctttcaacacgctccttaagtcaacttacacggagaaatatgtatctcgtcccttttcagttggtggatacaactggacacttgttgtgttcccaaatgggaacaagaaggatagtggttcagggtacctttctctttacgtagccatagacaactcaactctcggacaacaagagatttacgcagatctaaggttttacatctttaacaagaatgagaggaagtacttcactatccaagataccgatgtgtggaagtttagtgtcttcaaaacgatgtggggattctctcaggtcctccccattgatacattcaaagatccgacaaaaggatatctctacgatggagatcactgcgagtttggtgttgatgtaaccatgccttctctctacgaaaaatcggaacttttctctgtcacagagaattttctaaatccgagattcacctggaccattcggggattctctacgctgctaaaaaacagttacctatcagaagtgttctccatcggaggaagaagttggaatatacaaatcaatccaagtggtcttggcacgggagagggaaaagctttgtcgatgtatcttggccttaatgtgaatgagatattcagaccatatgagaagatttatgttcgagccaagcttcgagctcttaaccaactcaatctcagtaacatcgaaagggaactcgatatttggtacaatggtccgggatatggagaatatagctggggtttccctgagtttatctatttcccttatctcacagattcatcaaagggtttcgttaagaacgatgtgttgatggttcaagttgaaatggaggccatttcttcaaccaagtacttcccgagttagattttctctaagcaaagaacttgtacctacctaccatgtgtttgatttgttatcaaatactaataagaatttgattatgcatttc

SEQ ID NO: 388 - DNA, 1314 bp, Arabidopsis thaliana
  misc_feature: Ceres SEEDLINE ID no.ME03280
  misc_feature: Inplanta Sequence
  misc_feature: Encodes the peptide sequence at SEQ ID NO. 389
aaaaaattactaaccatataagtctcagtactctctgttctgcaaacttcatacacaaaaccaacattaagagatggcgagtcactacagaaacacaagcgctattgcttatctattgctttgtctcttcattacatctgccactgcacattccttcatacgacaaatcactgatgacctcaaaacaaatctgcagcaggaggtaggagcaaaaccaatccaaaacctggacgtgggacattacttacaagaaaataaggagatctcatcacgtgattataaagtatcagcttcaaacgcagtgaaaggtttgagagatcgtcctccatcgtcttactctctcaagatggagtctttcaacacgctccttaagtcaacttacacggagaaatatgtatctcgtcccttttcagttggtggatacaactggacacttgttgtgttcccaaatgggaacaagaaggatagtggttcagggtacctttctctttacgtagccatagacaactcaactctcggacaacaagagatttacgcagatctaaggttttacatctttaacaagaatgagaggaagtacttcactatccaagataccgatgtgtggaagtttagtgtcttcaaaacgatgtggggattctctcaggtcctccccattgatacattcaaagatccgacaaaaggatatctctacgatggagatcactgcgagtttggtgttgatgtaaccatgccttctctctacgaaaaatcggaacttttctctgtcacagagaattttctaaatccgagattcacctggaccattcggggattctctacgctgctaaaaaacagttacctatcagaagtgttctccatcggaggaagaagttggaatatacaaatcaatccaagtggtcttggcacgggagagggaaaagctttgtcgatgtatcttggccttaatgtgaatgagatattcagaccatatgagaagatttatgttcgagccaagcttcgagctcttaaccaactcaatctcagtaacatcgaaagggaactcgatatttggtacaatggtccgggatatggagaatatagctggggtttccctgagtttatctatttcccttatctcacagattcatcaaagggtttcgttaagaacgatgtgttgatggttcaagttgaaatggaggccatttcttcaaccaagtacttcccgagttagattttctctaagcaaagaacttgtacctacctccatgtgtttgatttgttatcaaatactaataagaatttgattatgcatttcaaaaaaaaaaaaaaaaa

SEQ ID NO: 389 - protein, 379 aa, Arabidopsis thaliana
  misc_feature: Ceres SEEDLINE ID no.ME03280
  misc_feature: Bit score of 875.2 for HMM based on sequences of FIGURE 10.
  misc_feature (245)..(370): Pfam Name: MATH Pfam Description: MATH domain
MASHYRNTSAIAYLLLCLFITSATAHSFIRQITDDLKTNLQQEVGAKPIQNLDVGHYLQENKEISSRDYKVSASNAVKGLRDRPPSSYSLKMESFNTLLKSTYTEKYVSRPFSVGGYNWTLVVFPNGNKKDSGSGYLSLYVAIDNSTLGQQEIYADLRFYIFNKNERKYFTIQDTDVWKFSVFKTMWGFSQVLPIDTFKDPTKGYLYDGDHCEFGVDVTMPSLYEKSELFSVTENFLNPRFTWTIRGFSTLLKNSYLSEVFSIGGRSWNIQINPSGLGTGEGKALSMYLGLNVNEIFRPYEKIYVRAKLRALNQLNLSNIERELDIWYNGPGYGEYSWGFPEFIYFPYLTDSSKGFVKNDVLMVQVEMEAISSTKYFPS

SEQ ID NO: 390 - DNA, 600 bp, Arabidopsis thaliana
  misc_feature (1)..(600): Ceres Promoter PD2995
  misc_feature (1)..(600): Ceres Promoter PD2263
caaaaatatctaatttgcagcattaatttgagtaccgataactattattataatcgtcgtgattcgcaatcttcttcattagatgctgtcaagttgtactcgcacgcggtggtccagtgaagcaaatccaacggtttaaaaccttcttacatttctagatctaatctgaaccgtcagatatctagatctcattgtctgaacacagttagatgaaactgggaatgaatctggacgaaattacgatcttacaccaaccccctcgacgagctcgtatatataaagcttatacgctcctccttcaccttcgtactactactaccaccacatttctttagctcaaccttcattactaatctccttttaaggtatgttcacttttcttcgattcatactttctcaagattcctgcatttctgtagaatttgaaccaagtgtcgatttttgtttgagagaagtgttgatttatagatctggttattgaatctagattccaatttttaattgattcgagtttgttatgtgtgtttatactacttctcattgatcttgtttgatttctctgctctgtattaggtttctttcgtgaatcagatcggaaaa

SEQ ID NO: 391 - DNA, 1815 bp, Glycine max
  misc_feature: Ceres CLONE ID no.528125
  misc_feature: Encodes the peptide sequence at SEQ ID NO. 392
gagcaatagcaacacagcaatagcttctggtgatctcgttttctcacattgctctcttccccctttctctctcctctttctctctcttccattgcttctccataagcaacgccacgcgaggtcaattgcgccatcgccatgactgtgatgactcctgctcccattgaccagcagcaggaggacgaggagatgcttgtcccgcacacggatttggctgagaataatcaccaacccatggaagttgtggctcaacctgatgctgccaacactgtggagagtcagcctgtcgaggatccttcaacatcaaggttcacatggaaaattgacaacttttctaggatgaatacaaagaagctctattcagaaatatttgttgttggtggttataaatggcgtgtacttattttcccaaaagggaacaatgtggactatttgtccatgtatttggatgttgcagattcagctagtttaccctatggctggagtagatatgcacagtttagcttggcagttgttaatcaaatccataataaatactctgtgagaaaagacacacagcaccaattcaatgcgcgggaaagtgattggggtttcacatctttcatgccgcttggtgaattgtatgatcctagtagagggtatcttgtgaatgatactcttgtagttgaagccgaggtttttgttcgtagaattgttgattactggacttatgattcaaaaaaggagactggctatgttggacttaagaaccagggagctacatgttatatgaattctctactccaaactttgtaccatattccttattttcgaaaggctgtataccacatgccaacaacagagaatgacatgccctctggaagcatccctttggctttgcaaagtttattctacaagctccagtatagtgacaccagtgttgcaacaaaggagctcactaaatcttttggatgggatacatatgattctttcatgcagcatgatgttcaagaactgaacagagtcctctgtgaaaaacttgaagacaagatgaagggaactgttgttgagggaactatacagaagctatttgaagggcatcatatgaattatatcgaatgcatcaatgtggactataaatcaactagaaaggagtcattttatgaccttcagcttgatgtgaagggctgtcctgatgtttatgcttcctttgacaagtatgttgaagttgaacgtcttgaaggggataacaaatatcatgcggaacaatatggtttgcaggatgctaagaagggtgtcctgttcattgatttccctcctgttcttcagcttcaactgaaaagatttgaatatgactttatgcgggatactatggtcaagattaatgaccgctatgagtttcccttgcaacttgaccttgatcgtgagaatggaaaatatttatcacctgatgctgataggaatgtccgcaatctttacacacttcatagcgttttggttcatagtggtggtgtgcatggtggacattattatgcttttatcaggccgactctatctgagcagtggtataaatttgatgatgagagggtgactaaagaagacactaaacgggccattagaggaaaaaaaaagcaatatggtggtgaggaagagttaccacagacaaatcctggatttaacaacactccttttaaattcaccaaatattcaaatgcttatatgctggtgtatatacgtgaagctgacaaggacaaagtaatatgcaatgtggatgagaaagacattgctgaacatttaagggagaggttgaagaaagaacaagaagaaaaagagcac

SEQ ID NO: 392 - protein, 559 aa, Glycine max
  misc_feature: Ceres CLONE ID no.528125
  misc_feature: Bit score of 1221.4 for HMM based on sequences of FIGURE 10.
  misc_feature (62)..(182): Pfam Name: MATH Pfam Description: MATH domain
  misc_feature: Functional Homolog Of Ceres SEEDLINE ID no. ME03280 at SEQ ID NO. 389
MTVMTPAPIDQQQEDEEMLVPHTDLAENNHQPMEVVAQPDAANTVESQPVEDPSTSRFTWKIDNFSRMNTKKLYSEIFVVGGYKWRVLIFPKGNNVDYLSMYLDVADSASLPYGWSRYAQFSLAVVNQIHNKYSVRKDTQHQFNARESDWGFTSFMPLGELYDPSRGYLVNDTLVVEAEVFVRRIVDYWTYDSKKETGYVGLKNQGATCYMNSLLQTLYHIPYFRKAVYHMPTTENDMPSGSIPLALQSLFYKLQYSDTSVATKELTKSFGWDTYDSFMQHDVQELNRVLCEKLEDKMKGTVVEGTIQKLFEGHHMNYIECINVDYKSTRKESFYDLQLDVKGCPDVYASFDKYVEVERLEGDNKYHAEQYGLQDAKKGVLFIDFPPVLQLQLKRFEYDFMRDTMVKINDRYEFPLQLDLDRENGKYLSPDADRNVRNLYTLHSVLVHSGGVHGGHYYAFIRPTLSEQWYKFDDERVTKEDTKRAIRGKKKQYGGEEELPQTNPGFNNTPFKFTKYSNAYMLVYIREADKDKVICNVDEKDIAEHLRERLKKEQEEKEH

SEQ ID NO: 393 - DNA, 1559 bp, Gossypium hirsutum
  misc_feature: Ceres CLONE ID no.1894772
  misc_feature: Encodes the peptide sequence at SEQ ID NO. 394
actgtaataaaatcaccaaataaaatcaacccaaaaaatagagaaaaaatctttctccgagtttcgcctttctcgttcctcttgttttcgtaagcttgtttacctctcaatttcatagctatgactgttatggcccctgcccctatcgatcaacaagaagatgaggaaatgctcgtcccacagtctgatttgaccgacaatcaccagcccatggaagttgtagcgcaacccgaagctgcaaatactgtggaaaatcaaccagttgaggatcctccttcatcaagattcacttggaggattgaaaacttctctaggttaaacgctaagaagcattattctgaagtcttcgttgtcggtggttataaatggcgaatactgctatttccaaagggaaacaatgtggatcatttgtctatgtatttggatgttgctgactcagcaagcttaccctatgggtggagtagatatgcccagttcagtttggcagtagttaatcaaattcataataaatattctatcagaaaagacacacagcaccagttcaatgcacgagaaagtgattggggttttacatcctttatgcccctcggcgagttatatgatccttgcagagggtatcttgtgaatgacactttgattgttgaagcagaggtggttgtccgcaggattgttgattactggacatatgactcaaagaaggaaactggttatgttggacttaaaaatcaaggagcaacatgttacatgaattctctgcttcaaactctgtatcacattccttacttcaggaaggcagtgtatcatatgcctacaactgagaatgatatgccatcaggaagcatccctcttgctctgcagagtttattttacaaactccagtacagtgacagcagtgttgcaacaaaagagctgaccaaatcttttggatgggacacacatgattctttcatgcagcacgatgttcaagaacttaatagagttctgtgtgaaaaacttgaagataaaatgaagggaactgttgtggaaggcaccatacaacagttgtttgaggggcaccatatgaattacattgagtgcattaatgtggattataaatctacaaggaaggagtcattttatgatcttcagcttgatgttaaaggctgtcatgatgtatatgcttcttttgacaagtatgtagaagttgaacgccttgaaggtgataataaatatcatgccgaacaatatggcttgcaggatgctaagaagggtgtcttgtttattgacttccctccggtccttcagcttcagcttaagcgatttgaatatgattttatgcgggacactatggtcaagattaatgatcgctatgagttccctttgcaacttgaccttgaccgagatggtggaaaatacttatcaccagatgctgataggagagtccgcaatctttacacgcttcacagtgtcctcgttcacagtggtggggtgcatggtggacattattatgcatttatcaggccgactctttctgatcaatggtatggatcatattaatgcattcaatcctttgcagcagc

SEQ ID NO: 394 - protein, 471 aa, Gossypium hirsutum
  misc_feature: Ceres CLONE ID no.1894772
  misc_feature: Bit score of 1224.1 for HMM based on sequences of FIGURE 10.
  misc_feature (60)..(180): Pfam Name: MATH Pfam Description: MATH domain
  misc_feature: Functional Homolog Of Ceres SEEDLINE ID no. ME03280 at SEQ ID NO. 389
MTVMAPAPIDQQEDEEMLVPQSDLTDNHQPMEVVAQPEAANTVENQPVEDPPSSRFTWRIENFSRLNAKKHYSEVFVVGGYKWRILLFPKGNNVDHLSMYLDVADSASLPYGWSRYAQFSLAVVNQIHNKYSIRKDTQHQFNARESDWGFTSFMPLGELYDPCRGYLVNDTLIVEAEVVVRRIVDYWTYDSKKETGYVGLKNQGATCYMNSLLQTLYHIPYFRKAVYHMPTTENDMPSGSIPLALQSLFYKLQYSDSSVATKELTKSFGWDTHDSFMQHDVQELNRVLCEKLEDKMKGTVVEGTIQQLFEGHHMNYIECINVDYKSTRKESFYDLQLDVKGCHDVYASFDKYVEVERLEGDNKYHAEQYGLQDAKKGVLFIDFPPVLQLQLKRFEYDFMRDTMVKINDRYEFPLQLDLDRDGGKYLSPDADRRVRNLYTLHSVLVHSGGVHGGHYYAFIRPTLSDQWYGSY

SEQ ID NO: 395 - DNA, 1296 bp, Arabidopsis thaliana
  misc_feature: Ceres CLONE ID no.40420
  misc_feature: Encodes the peptide sequence at SEQ ID NO. 396
aaaaattactaaccatataagtctcagtactctctgttctgcaaacttcatacacaaaaccaacattaagagatggcgagtcactacagaaacacaagcgctattgcttatctattgctttgtctcttcattacatctgccactgcacattccttcatacgacaaatcactgatgacctcaaaacaaatctgcagcaggaggtaggagcagaaccaatccaaaacctggacgtgggacattacttacaagaaaataaggagatctcatcacgtgattataaagtatcagcttcaaacgcagtgaaaggtttgagagatcgtcctccatcgtcttactctctcaagatggagtctttcaacacgctccttaagtcaacttacacggagaaatatgtatctcgtcccttttcagttggtggatacaactggacacttgttgtgttcccaaatgggaacaagaaggatagtggttcagggtacctttctctttacgtagccatagacaactcaactctcggacaacaagagatttacgcagatctaaggttttacatctttaacaagaatgagaggaagtacttcactatccaagataccgatgtgtggaagtttagtgtcttcaaaacgatgtggggattctctcaggtcctccccattgatacattcaaagatccgacaaaaggatatctctacgatggagatcactgcgagtttggtgttgatgtaaccatgccttctctctacgaaaaatcggaacttttctctgtcacagagaattttctaaatccgagattcacctggaccattcggggattctctacgctgctaaaaaacagttacctatcagaagtgttctccatcggaggaagaagttggaatatacaaatcaatccaagtggtcttggcacgggagagggaaaagctttgtcgatgtatcttggccttaatgtgaatgagatattcagaccatatgagaagatttatgttcgagccaagcttcgagctcttaaccaactcaatctcagtaacatcgaaagggaactcgatatttggtacaatggtccgggatatggagaatatagctggggtttccctgagtttatctatttcccttatctcacagattcatcaaagggtttcgttaagaacgatgtgttgatggttcaagttgaaatggaggccatttcttcaaccaagtacttcccgagttagattttctctaagcaaagaacttgtacctacctccatgtgtttgatttgttatcaaatactaataagaatttgattatgcatttc

SEQ ID NO: 396 - protein, 379 aa, Arabidopsis thaliana
  misc_feature: Ceres CLONE ID no.40420
  misc_feature: Bit score of 873.6 for HMM based on sequences of FIGURE 10.
  misc_feature (245)..(370): Pfam Name: MATH Pfam Description: MATH domain
  misc_feature: Functional Homolog Of Ceres SEEDLINE ID no. ME03280 at SEQ ID NO. 389
MASHYRNTSAIAYLLLCLFITSATAHSFIRQITDDLKTNLQQEVGAEPIQNLDVGHYLQENKEISSRDYKVSASNAVKGLRDRPPSSYSLKMESFNTLLKSTYTEKYVSRPFSVGGYNWTLVVFPNGNKKDSGSGYLSLYVAIDNSTLGQQEIYADLRFYIFNKNERKYFTIQDTDVWKFSVFKTMWGFSQVLPIDTFKDPTKGYLYDGDHCEFGVDVTMPSLYEKSELFSVTENFLNPRFTWTIRGFSTLLKNSYLSEVFSIGGRSWNIQINPSGLGTGEGKALSMYLGLNVNEIFRPYEKIYVRAKLRALNQLNLSNIERELDIWYNGPGYGEYSWGFPEFIYFPYLTDSSKGFVKNDVLMVQVEMEAISSTKYFPS

SEQ ID NO: 397 - DNA, 1335 bp, Arabidopsis thaliana
  misc_feature: Ceres CLONE ID no.116206
  misc_feature: Encodes the peptide sequence at SEQ ID NO. 398
aaaagcattattaactaagcatgtatctcccactaaggcacaaattactaaccatataagtctcagtactctctgttctgcaaacttcatacacaaaaccaacattaagagatggcgagtcactacagaaacacaagcgctattgcttatctattgctttgtctcttcattacatctgccactgcacattccttcatacgacaaatcactgatgacctcaaaacaaatctgcagcaggaggtaggagcagaaccaatccaaaacctggacgtgggacattacttacaagaaaataaggagatctcatcacgtgattataaagtatcagcttcaaacgcagtgaaaggtttgagagatcgtcctccatcgtcttactctctcaagatggagtctttcaacacgctccttaagtcaacttacacggagaaatatgtatctcgtcccttttcagttggtggatacaactggacacttgttgtgttcccaaatgggaacaagaaggatagtggttcagggtacctttctctttacgtagccatagacaactcaactctcggacaacaagagatttacgcagatctaaggttttacatctttaacaagaatgagaggaagtacttcactatccaagataccgatgtgtggaagtttagtgtcttcaaaacgatgtggggattctctcaggtcctccccattgatacattcaaagatccgacaaaaggatatctctacgatggagatcactgcgagtttggtgttgatgtaaccatgccttctctctacgaaaaatcggaacttttctctgtcacagagaattttctaaatccgagattcacctggaccattcggggattctctacgctgctaaaaaacagttacctatcagaagtgttctccatcggaggaagaagttggaatatacaaatcaatccaagtggtcttggcacgggagagggaaaagctttgtcgatgtatcttggccttaatgtgaatgagatattcagaccatatgagaagatttatgttcgagccaagcttcgagctcttaaccaactcaatctcagtaacatcgaaagtgaactcgatatttggtacaatggtccgggatatggagaatatagctggggtttccctgagtttatctatttcccttatctcacagattcatcaaagggtttcgttaagaacgatgtgttgatggttcaagttgaaatggaggccatttcttcaaccaagtacttcccgagttagattttctctaagcaaagaacttgtacctacctccatgtgtttgatttgttatcaaatactaataagaatttgattatgcatttc

SEQ ID NO: 398 - protein, 379 aa, Arabidopsis thaliana
  misc_feature: Ceres CLONE ID no.116206
  misc_feature: Bit score of 868.0 for HMM based on sequences of FIGURE 10.
  misc_feature (245)..(370): Pfam Name: MATH Pfam Description: MATH domain
  misc_feature: Functional Homolog Of Ceres SEEDLINE ID no. ME03280 at SEQ ID NO. 389
MASHYRNTSAIAYLLLCLFITSATAHSFIRQITDDLKTNLQQEVGAEPIQNLDVGHYLQENKEISSRDYKVSASNAVKGLRDRPPSSYSLKMESFNTLLKSTYTEKYVSRPFSVGGYNWTLVVFPNGNKKDSGSGYLSLYVAIDNSTLGQQEIYADLRFYIFNKNERKYFTIQDTDVWKFSVFKTMWGFSQVLPIDTFKDPTKGYLYDGDHCEFGVDVTMPSLYEKSELFSVTENFLNPRFTWTIRGFSTLLKNSYLSEVFSIGGRSWNIQINPSGLGTGEGKALSMYLGLNVNEIFRPYEKIYVRAKLRALNQLNLSNIESELDIWYNGPGYGEYSWGFPEFIYFPYLTDSSKGFVKNDVLMVQVEMEAISSTKYFPS

SEQ ID NO: 399 - DNA, 1264 bp, Brassica napus
  misc_feature: Ceres CLONE ID no.1083320
  misc_feature: Encodes the peptide sequence at SEQ ID NO. 400
acacacctctttcacaacaaaaccttaaaagatgataagtcactacagaaacaccatttctgttgtttatctcttggtttgtatcttcattacatcttcttctgcaagttccttcctacgacaattcacagatgacttcaacacaaatcttcagcaggagaatggagcaggaccaaatccaaacgtgggtggagcagatcacttacatcaacatcaagagatctcatcacgtgatcacaaagtctcagtttcaagtacggtgaatggtctgagagatcgtcctccatcttcatactctctcaagatggagtctttcaacaagctccttaactcaccttacacagagagataccaatctcgtccttttacagttggtggatacaactggacacttatggtgtatcccaatgggaacaagaaggatagtggttcagggtacctttcactttacgtagccatagacaattcaactctcgtcgctggacagcaagaggtttacgcagatctcagattttacgtattcaacaacaacgagaggaagtactttactatccaagataccaatgtgtggcgttttaatgtcttcaaaacgatgtggggattctctcaagtgctccctgttgctacattcaaagacccggcaaacggatacctctacgatggagaccactgcgagtttggtgttgatgtgaccattcccactacgtatcaaatatcagaacttttctctattgctgacaacttctataaccccaagttcacctggaccattaggggattctccacgctgttcaaagatacttactactcagatctgttctccattggagggagaacttggactatacaagtgaatccaagtggtcgtggcacgggagcaggaaaagccttgtccatgtatcttaaccttgatgtgaatgagaagttcagaccctacgagaagatttatgttcgaggcaagcttcgagttcttaaccaacgtggactcaataacatcgaaaggcaactggatatctggtaccagggtccaggttatggagaatacagctggggttaccatgagtttatctctttctccgatctcagagattcagctaagggttttgttgtgaacgacgtgttgatggttcaggccgaactcgaggacatttcttcaaccaagtacttacctaactagattgtctctagccaaggaacatgttgaacctccatgtttttgctttctcatcagccatctaaaaatgataacctctttttgcgtttc

SEQ ID NO: 400 - protein, 381 aa, Brassica napus
  misc_feature: Ceres CLONE ID no.1083320
  misc_feature: Bit score of 896.2 for HMM based on sequences of FIGURE 10.
  misc_feature (247)..(372): Pfam Name: MATH Pfam Description: MATH domain
  misc_feature: Functional Homolog Of Ceres SEEDLINE ID no. ME03280 at SEQ ID NO. 389
MISHYRNTISVVYLLVCIFITSSSASSFLRQFTDDFNTNLQQENGAGPNPNVGGADHLHQHQEISSRDHKVSVSSTVNGLRDRPPSSYSLKMESFNKLLNSPYTERYQSRPFTVGGYNWTLMVYPNGNKKDSGSGYLSLYVAIDNSTLVAGQQEVYADLRFYVFNNNERKYFTIQDTNVWRFNVFKTMWGFSQVLPVATFKDPANGYLYDGDHCEFGVDVTIPTTYQISELFSIADNFYNPKFTWTIRGFSTLFKDTYYSDLFSIGGRTWTIQVNPSGRGTGAGKALSMYLNLDVNEKFRPYEKIYVRGKLRVLNQRGLNNIERQLDIWYQGPGYGEYSWGYHEFISFSDLRDSAKGFVVNDVLMVQAELEDISSTKYLPN

SEQ ID NO: 401 - protein, 363 aa, Arabidopsis thaliana
  misc_feature: Public GI ID no.15231115
  misc_feature: Bit score of 447.4 for HMM based on sequences of FIGURE 10.
  misc_feature (228)..(348): Pfam Name: MATH Pfam Description: MATH domain
  misc_feature: Functional Homolog Of Ceres SEEDLINE ID no. ME03280 at SEQ ID NO. 389
MMSYHYINTLCIVISLLSCLFITSSFAGPVPNQENGSQKIFPTQISSRDSKVSLSSTVKGLRERPPSSYSLKMESFNTLMKSVYTERYESRPFRVGRYNWTLVVYPKGNKNDNGTGHISLYVVLDNSTLTSQSEEVHVDLRFYVFNKKETKYFTIQDTDVWRFSAIKRMWGFSKVLPLITFNNLKNGYLYDVDHCEFGVDVIIPPFYEKSEVFSVTKSFPSPRFTWYIQGYSTLPTDYLSEEFIIGGKSWNLRIFKNGFGAFEGKNLSLYLNLGPQELLKAKPYDKVYVRAKLRVPNQFGSQSNLVLERPLDNWFSPQTIGWGYADFMPLSDLRNSSKGFLVNDMLVVQVAMEEISSTNYLPK

SEQ ID NO: 402 - protein, 375 aa, Arabidopsis thaliana
  misc_feature: Public GI ID no.15231117
  misc_feature: Bit score of 438.6 for HMM based on sequences of FIGURE 10.
  misc_feature (249)..(366): Pfam Name: MATH Pfam Description: MATH domain
  misc_feature: Functional Homolog Of Ceres SEEDLINE ID no. ME03280 at SEQ ID NO. 389
MTSLYRNTSSFVYLLFCLFITSSSAGSFIRQFSDDFNTIQQQKGKDGPTPNLEKGNYLHKHNEISSSLDYKVSASNIVKGLTEVPPSSYSFKIESYNSFLKIPYLGFESRPFAAGGYNWVLKVHPNGLTWDGTSGYVSLYVLLHESTPITADQVVYADLRFYIFNNNEKKYFTVQDTNVWKFTAPKRLLGFPKVMSADQFEDLRNGYIYDNHCEFGVDVTVASHYQKSESLFVTEKFDNPIFTYALLRFSTLLKESYQSDVFSIGGRSMYLQVFPNGRNLSKGKAMSLYLNINDKFKPFEMIYVRAKLRVLNQRKLNNVEIQVSNWYTSWFYYSGDFQIIPLADLRDSSKGFVVNDMLKVEVQLEGISSTKWYPS

SEQ ID NO: 403 - protein, 382 aa, Arabidopsis thaliana
  misc_feature: Public GI ID no.9294554
  misc_feature: Bit score of 409.9 for HMM based on sequences of FIGURE 10.
  misc_feature (247)..(367): Pfam Name: MATH Pfam Description: MATH domain
  misc_feature: Functional Homolog Of Ceres SEEDLINE ID no. ME03280 at SEQ ID NO. 389
MDQINREDEKVCLVHVNLPLISTLVAEGDENTRKTLSCQNLTIFSPRPVPNQENGSQKIFPTQISSRDSKVSLSSTVKGLRERPPSSYSLKMESFNTLMKSVYTERYESRPFRVGRYNWTLVVYPKGNKNDNGTGHISLYVVLDNSTLTSQSEEVHVDLRFYVFNKKETKYFTIQDTDVWRFSAIKRMWGFSKVLPLITFNNLKNGYLYDVDHCEFGVDVIIPPFYEKSEVFSVTKSFPSPRFTWYIQGYSTLPTDYLSEEFIIGGKSWNLRIFKNGFGAFEGKNLSLYLNLGPQELLKAKPYDKVYVRAKLRVPNQFGSQSNLVLERPLDNWFSPQTIGWGYADFMPLSDLRNSSKGFLVNDMLVVQVAMEEISSTNYLPK

SEQ ID NO: 404 - DNA, 1280 bp, Brassica napus
  misc_feature: Ceres CLONE ID no.1122866
  misc_feature: Encodes the peptide sequence at SEQ ID NO. 405
actccatccacagagaaaagatgaagtatcactacagaaacaccatctctatctctgtagcatatctctttctttgtcttttcatcacttacgtgtcttcacaatccttgatacgacaaatcaccgatgacgtcaatacgaatctaaaagaagatgtgccttacgtacaaaaacatcaagagatctcatcgcgtcattataatgtctctcattcaaagacggttacgggtatgagaaatcgtcgtccatcgacttactcttacaagattgagacaaacgtcgtagacaaatttgaaactcgccctttcatggttggtggatacaattggattctccatgtgtaccttaatgggaacacaaaggatggtggtgctggttacgtttcgctttacgtagaaatagacaagtcaggtttcgtagattctgcacatcaagaggtttacgcggatctcaggttttacatcttcaacaggaacgagaggaagtactttaccatccaagatacggatgtatggcgattcgatgctttcaacacgatgtggggattctctaaggtcctccccgttgatacctttaaagacccgaaaaatggttacctttacaatggagaacactgtgagtttggtgttgatgtgatcgttcctactccctttgaagaatcagaaactttctctatcagtagtagttctgataaatacacctggacgattcagaaattctccacgttgtccaaagatttgtactcacctgtgatctctcttggaggaaaaaaatggaatatattagtggttccagctggttctggctcgggaagaggaaaatacgtttcaatgtttcttcaactttctacaaatcaacgaagaggatatgaatacatttatgttcgagtcaagtttcgagttattaaccaaatcaggaattggtatggaagaacctattcttggggtatcgtggaccttatctctttcgatgatctcagagattcgtcaaagggtttccttgtaaatgacgcgttgatcgttgaagtccaattggaggctatttctactaccaagtacttcccttagttaactaaaggaacattcagctctatatctttgcgttattaccaaccattttgtgtttttcttttcgggtgttatcaaccacacaattataataagaatccatgtcaaaccaagaaaaaaatattcataaaaatatgtaatgttttatttaatgaattttgtaatgttttacttaagcttttcatgtcagtaataaaactcttttatattgtg

SEQ ID NO: 405 - protein, 348 aa, Brassica napus
  misc_feature: Ceres CLONE ID no.1122866
  misc_feature: Bit score of 404.9 for HMM based on sequences of FIGURE 10.
  misc_feature (230)..(340): Pfam Name: MATH Pfam Description: MATH domain
  misc_feature: Functional Homolog Of Ceres SEEDLINE ID no. ME03280 at SEQ ID NO. 389
MKYHYRNTISISVAYLFLCLFITYVSSQSLIRQITDDVNTNLKEDVPYVQKHQEISSRHYNVSHSKTVTGMRNRRPSTYSYKIETNVVDKFETRPFMVGGYNWILHVYLNGNTKDGGAGYVSLYVEIDKSGFVDSAHQEVYADLRFYIFNRNERKYFTIQDTDVWRFDAFNTMWGFSKVLPVDTFKDPKNGYLYNGEHCEFGVDVIVPTPFEESETFSISSSSDKYTWTIQKFSTLSKDLYSPVISLGGKKWNILVVPAGSGSGRGKYVSMFLQLSTNQRRGYEYIYVRVKFRVINQIRNWYGRTYSWGIVDLISFDDLRDSSKGFLVNDALIVEVQLEAISTTKYFP

SEQ ID NO: 406 - protein, 370 aa, Arabidopsis thaliana
  misc_feature: Public GI ID no.15232931
  misc_feature: Bit score of 210.5 for HMM based on sequences of FIGURE 10.
  misc_feature (243)..(361): Pfam Name: MATH Pfam Description: MATH domain
  misc_feature: Functional Homolog Of Ceres SEEDLINE ID no. ME03280 at SEQ ID NO. 389
MSEKGLIKKEDHMFQEEKRKTNYGAIGLACFISCFFAFQFMKIVTTQPSTTTTSSIAVIDSPMSSHKLSDRREIWRVIPPSTYCLKIESFIKFATSPNAEKYESRPFESGGYNWTLIVYPKGNIKEGAPLNYVSMYVQIDNSTLLNSPKEVYAEVKFFIYNRKEDKYLTYQETDAKRFFLFKPYWGYGNVRPYTDVANPNAGWLFDGDNVLFGVDVFVTEVFNKWEVFSFTKSLHDRLYKWTLPNFSSLEKQYYVSDKFVIGGRSWALKVYPSGDGEGQGNSLSLYVVAVDVKPYDKIYLKAKLRIINQRDSKHMEKKVESWSDQANSWGFQKFVPFADLKDTSKGLLVNDTLKMEIEFEDFSNTKYFPS

SEQ ID NO: 407 - protein, 595 aa, Arabidopsis thaliana
  misc_feature: Public GI ID no.15233264
  misc_feature: Bit score of 223.5 for HMM based on sequences of FIGURE 10.
  misc_feature (465)..(584): Pfam Name: MATH Pfam Description: MATH domain
  misc_feature: Functional Homolog Of Ceres SEEDLINE ID no. ME03280 at SEQ ID NO. 389
MGSTVLDANPSTLREHPPSSYSIKFENIAELDDGKYESSLFAAGGYNWRLVIYPKGNAKDEGSGFISMYVEIDSTNLLSSPLTGVFAYLVFFVYNKKTDKYFTIKDQCEFGVDVLVAPSLTKWEVVSFNQKILDPKFSWSLKKFKELKEELYNSDKFLVGGRQWFLKVHPKGVKARDNSLSIYVYLSESETLNAEEKIYTRVHLRVLDPFGSIHQAGQCNFWRTNTNKNQGYGWPTFASLDKVREKYLDNEGSLNIEIEFAVVSSTKYSPILILSSLASGSMMCSSVSSTTLRSWRERTPNSYSLKLQNISQVEKSTLFSDGKYQSRLFSSGGYNWRMIIYPKGNRKDDGSGFISMYVEIDSTSLLTTPTTEVFADLRFFVFNKKENKYYTIQHVESKLFNAFRTIWGLAQVLPVDTFTDPKNGYIFEGDQCEFGVDVIVAAPPTNWEIHTLHEALSQPKFFWTVKNFSELNNNVYTSGNFSMRERKWVLKLYPKGDVKGDRKWLSLYLYLDQSETLKESEKIFVQAQLRVLDPRGSNHVTHKISSWYTSSNTAWGYRKFVSLAEIPKAYLDKDTLKVQIDVEVVSEAEFSPSMI

SEQ ID NO: 408 - protein, 312 aa, Arabidopsis thaliana
  misc_feature: Public GI ID no.9279767
  misc_feature: Bit score of 197.5 for HMM based on sequences of FIGURE 10.
  misc_feature (182)..(301): Pfam Name: MATH Pfam Description: MATH domain
  misc_feature: Functional Homolog Of Ceres SEEDLINE ID no. ME03280 at SEQ ID NO. 389
MMCSSVSSTTLRSWRERTPNSYSLKLQNISQVEKSTLFSDGKYQSRLFSSGGYNWRMIIYPKGNRKDDGSGFISMYVEIDSTSLLTTPTTEVFADLRFFVFNKKENKYYTIQQSKLFNAFRTIWGLAQVLPVDTFTDPKNGYIFEGDQCEFGVDVIVAAPPTNWEIHTLHEALSQPKFFWTVKNFSELNNNVYTSGNFSMRERKWVLKLYPKGDVKGDRKWLSLYLYLDQSETLKESEKIFVQAQLRVLDPRGSNHVTHKISSWYTSSNTAWGYRKFVSLAEIPKAYLDKDTLKVQIDVEVVSEAEFSPSMI

SEQ ID NO: 409 - DNA, 1287 bp, Brassica napus
  misc_feature: Ceres CLONE ID no.1037358
  misc_feature: Encodes the peptide sequence at SEQ ID NO. 410
aattcgcacgagaccattacctagaacatcctaatcgaaaaaggaagaaaatacatatttagaaataaaagtttaaaccaaaatgtttctaaaagaaaaaaagaaaagtcaatttgaatggagcagttttgctgttctcttgtttcttttgtgctgtctttgcaaccattccactaaatccactagctactacacaatccaccaacgcagtgccttgtaatactcacggttcaagggtcgctaaggcttatggtgtagacgctaacctctcggccgagcaaagattcatgcgggaccgtccaccaagttcttactgcgtgcggatcgaagggtgcagcgaactaatcactaaaagtccaaacgtacaaaagtacgagacccgtcctttcagtgtaggcggattcaactggacttttatcatcgaaccgtttgggagcacgactaacttagggacatggatatctgcatatgttgcaatagatcctaaaggtctagttggcgaaaaccgcgaggtttatgcagatctaagatttttggcatacagcaagactttcgatcaatactggacatctatggatacggacatcaggcgtttccatcaatccaggacaacttggggaaatccaaatttcatccgacatgttaacttcatagctaaagatagagagtacattttcgacaatgaccaatgtgtgtttggtgtagacatctcggtgtttcctttttttaacaaatgggaggtcttgtcgatcgataagacggtctatgggcctaactcgtggaagcttctgaaattctcaacattgaccagagatttttacgtatctgacgaattctccattggaggaaaaacatgggcatttaaggtgtatccaaacggttatggcacaggagaaggaaactcgttgtccctttatctgacactaactgaaaaccagaccttgaaaccttacgaaaaggtttatgtccgagccaagctgcgagttcttgaccaaaaacaatcaagacatcttgaaaaaccaattctatcctggttcaacgccacaggagaaagttctgggttggagcggtttgtgtctttgactgatcttcaaaatccagccaaaggtttcatcgtgaatgattctctgtccgtacaagttcaattcgaggctgtctcatcaactaattactattctagcaatgccgctcaaatcagtagtttctaaatgtctacattgtcgaatctttaaataacaggctttgcatgtatacaaagcgaataataataaaaacttgacacgcttc

SEQ ID NO: 410 - protein, 306 aa, Brassica napus
  misc_feature: Ceres CLONE ID no.1037358
  misc_feature: Bit score of 116.2 for HMM based on sequences of FIGURE 10.
  misc_feature (167)..(289): Pfam Name: MATH Pfam Description: MATH domain
  misc_feature: Functional Homolog Of Ceres SEEDLINE ID no. ME03280 at SEQ ID NO. 389
MRDRPPSSYCVRIEGCSELITKSPNVQKYETRPFSVGGFNWTFIIEPFGSTTNLGTWISAYVAIDPKGLVGENREVYADLRFLAYSKTFDQYWTSMDTDIRRFHQSRTTWGNPNFIRHVNFIAKDREYIFDNDQCVFGVDISVFPFFNKWEVLSIDKTVYGPNSWKLLKFSTLTRDFYVSDEFSIGGKTWAFKVYPNGYGTGEGNSLSLYLTLTENQTLKPYEKVYVRAKLRVLDQKQSRHLEKPILSWFNATGESSGLERFVSLTDLQNPAKGFIVNDSLSVQVQFEAVSSTNYYSSNAAQISSF

SEQ ID NO: 411 - protein, 396 aa, Arabidopsis thaliana
  misc_feature: Public GI ID no.18406229
  misc_feature: Bit score of 169.3 for HMM based on sequences of FIGURE 10.
  misc_feature (258)..(375): Pfam Name: MATH Pfam Description: MATH domain
  misc_feature: Functional Homolog Of Ceres SEEDLINE ID no. ME03280 at SEQ ID NO. 389
MYSEEKKSRNYGSIFVYCFFCFVLIVEVARFAKPYINLQNLIETEAVVEEGFMAVGNSGNLPCGSSKPSSASVRAHDEQKLSQAVTTDTRTRPPNSYCVKFQSFVTMAKQVKENGGKYESRPFSVGGYNWTLLIYPVIYIPTDSGGYVSIYVRVDNSSLITNPKDVYAEITFLAYKSSTDKYQISQETEAQRFHLFKQQWGLLQFLPIYYFENPAYGYFFEGESVVFGVDINIVKPFENWEVFSNEQNIRDPIFEWRLTKFSTRFLDSYTSDSFSSGGRNWALKVYPNGVGNATGNSLSLYLLSDQSNDKGYVEAKLRVIDQIQSNNFEKKVAAWPNATENGWGFDRFLSFADIKNTSKGFLVNDTLKLEVQILSFSKTDYYSHQSSLNVLTGDST

SEQ ID NO: 412 - protein, 365 aa, Arabidopsis thaliana
  misc_feature: Public GI ID no.15226599
  misc_feature: Bit score of 152.6 for HMM based on sequences of FIGURE 10.
  misc_feature (257)..(355): Pfam Name: MATH Pfam Description: MATH domain
  misc_feature: Functional Homolog Of Ceres SEEDLINE ID no. ME03280 at SEQ ID NO. 389
MMCHGRKVKMRDNEMSQIRQSLIPTGTEVSAGDGERRRCKTPEGQREKVVSDNDFVEEDCVLSKGGELLFGFDITQLLGQQNWQGDSTIVNNLREHPPSSYSLKINKLSQLTFDKYESHRFLSGGYNWRLVIYPKGNEKDKGSGFISMYVEFDNTKVSSTSPMEVFAYIIFFVYNKKENKYFTIQDVEVKRFNALRTVWGLSQVLSLETFNDLENGYTFEGEQCEFGVDVMVASPITKWEVVSFDEKLDILKFSWSVKDFSVLKEEFYVSERFSMGGRLWDLQMYPKGDPRRDKKWLSIFLRLSGSETLTVDEKIYVIAHLRVLDPLGNWFRDRNKGWGYLEFLSFSKLRKSYLDLEDTFFPLNL

SEQ ID NO: 413 - DNA, 966 bp, Populus balsamifera subsp. trichocarpa
  misc_feature: Ceres ANNOT ID no.1447141
  misc_feature: Encodes the peptide sequence at SEQ ID NO. 414
atggccccagaaccagtcatggaagttaaaattcctcctagagatgatctagctgaaattacaaggtcaacgagggatcttcctccggctcactacacatttaagatcgaaaacttctccctacttgcaaatgcaaagatagacaacttcgaatcaggtgacttcgaagttggcagctacaaatggagattacgtctctatcctaacggaaacaagaaaaacaatggggatggacacatatctctatatttggcattttccaattcaaatgcactcccttttggctgggaggtcaacgtgaacttcagattgtttgtttataaccaaatccaagacaaatacttgactatccaatatgctaaaggaagggtaagacgctttcatggaatgaaaacagaattgggttttgaccaattaatccctctgactattttcaatgacgagtcaaagggatatctaattgatgatcgttgcatatttggagctgagatttttgttattaaacctactggcaaaggtgaatgcttgaccttggttaaccaacctgtcagcgacacttttacctggaaaattcagaacttttcagcactggatcaagaatcttacaagtcccaagttttttcttttggagggtacaaatgggctttgctggtttatccgaaagggaattcaacagagaaaggaaaaagcttgtctatctacttaaaaatggaggattttgaaactcttccatgtggacgaacaacgtatgctgaatacatgctgcgtgtgaaagaccaacttttcggaaaacatatcgaaaaaaaagcctattcccatttttcttattcaatcaaggactggggtcacctaaactttatgtctctcgatgacgtcaacgcccttccaaagggatttctagttaatgatactttggctgttgaggtacaaattcatgtgataacggtggtcaaggaattctcctga

SEQ ID NO: 414 - protein, 321 aa, Populus balsamifera subsp. trichocarpa
  misc_feature: Ceres ANNOT ID no.1447141
  misc_feature: Bit score of 670.5 for HMM based on sequences of FIGURE 10.
  misc_feature (191)..(313): Pfam Name: MATH Pfam Description: MATH domain
  misc_feature: Functional Homolog Of Ceres SEEDLINE ID no. ME03280 at SEQ ID NO. 389
MAPEPVMEVKIPPRDDLAEITRSTRDLPPAHYTFKIENFSLLANAKIDNFESGDFEVGSYKWRLRLYPNGNKKNNGDGHISLYLAFSNSNALPFGWEVNVNFRLFVYNQIQDKYLTIQYAKGRVRRFHGMKTELGFDQLIPLTIFNDESKGYLIDDRCIFGAEIFVIKPTGKGECLTLVNQPVSDTFTWKIQNFSALDQESYKSQVFSFGGYKWALLVYPKGNSTEKGKSLSIYLKMEDFETLPCGRTTYAEYMLRVKDQLFGKHIEKKAYSHFSYSIKDWGHLNFMSLDDVNALPKGFLVNDTLAVEVQIHVITVVKEFS

SEQ ID NO: 415 - DNA, 975 bp, Populus balsamifera subsp. trichocarpa
  misc_feature: Ceres ANNOT ID no.1485633
  misc_feature: Encodes the peptide sequence at SEQ ID NO. 416
atggaaggaatgacggaagttaatgatcaagcagaaaatacaaggtcaataagggatcttccacctgctcactacgcatttaagatcgaaaacttctccctgctttcaaatacgaaggtagacagcgtcgaatcaggtgacttcgaagttgacagttacaaatggagattatgcctccatcctaatggaaacaagaaaagcaatggggatggacacatatctctatatttagcattttccaaatcgaatgccccccctcttggttgggaagttaacgtggacttcaagctgtttgtttataaccaaatccatgacaagtacttgaccatccaaaatgctaatgggagggtgagacgctttcatggaatgaaaacagaaatgggttttgaccaattacttccactgactcttttcaatgatgagtcaaagggatatctaatcgatgactgttgcacatttggagctgagatttttgttataaaacatactagcaaaggtgaatgcttgtccctgatgaagcaaccttcccacagctctttcacctggagcattcaaaaattttcagcactagatcaagaatcttgcaagtcccaagtgtttgctactggagggcacaaatggacactgctggtttatcccaaagggaattcaacatttaaaggcaaaagcttgtctatcttcttaaccttggaggattctgaaactcttccatctggacgaacaatgtatgcagaattcacgctgcgcgtgagggaccaacttttcggaaaacacgtcgaaaaaactgctaattgccatttttctaattcaatcaacgattggggtcactttaacttcatgtctctcgatgagctcaatactcttgcaaagggatttctagttaataatactttggttgttgaggcacaaattcatgtgcttacggtggtcaaggaactctccgggagctgtgcttttatgcattccaagacctaa

SEQ ID NO: 416 - protein, 324 aa, Populus balsamifera subsp. trichocarpa
  misc_feature: Ceres ANNOT ID no.1485633
  misc_feature: Bit score of 445.9 for HMM based on sequences of FIGURE 10.
  misc_feature (184)..(306): Pfam Name: MATH Pfam Description: MATH domain
  misc_feature: Functional Homolog Of Ceres SEEDLINE ID no. ME03280 at SEQ ID NO. 389
MEGMTEVNDQAENTRSIRDLPPAHYAFKIENFSLLSNTKVDSVESGDFEVDSYKWRLCLHPNGNKKSNGDGHISLYLAFSKSNAPPLGWEVNVDFKLFVYNQIHDKYLTIQNANGRVRRFHGMKTEMGFDQLLPLTLFNDESKGYLIDDCCTFGAEIFVIKHTSKGECLSLMKQPSHSSFTWSIQKFSALDQESCKSQVFATGGHKWTLLVYPKGNSTFKGKSLSIFLTLEDSETLPSGRTMYAEFTLRVRDQLFGKHVEKTANCHFSNSINDWGHFNFMSLDELNTLAKGFLVNNTLVVEAQIHVLTVVKELSGSCAFMHSKT

SEQ ID NO: 417 - protein, 309 aa, Arabidopsis thaliana
  misc_feature: Public GI ID no.21537273
  misc_feature: Bit score of 177.9 for HMM based on sequences of FIGURE 10.
  misc_feature (26)..(153): Pfam Name: MATH Pfam Description: MATH domain
  misc_feature: Functional Homolog Of Ceres SEEDLINE ID no. ME03280 at SEQ ID NO. 389
MASSGDYDEIIKSISDAPPTHYMVKIESFSLLTKHAIERYETESFEAGGYKWKLVLYPNGNKSKNTKDHVSVYLALADSSSLSPGWEVYAVFRLYLLDQNKDNYLILQGNERRFHSVKREWGFDKFIPTGTFSDSSNGYLMEDTCMFGADVFVSKERRSGRGECLSMIKDATSSKHVWKIENFSKLDKESYDSNAFFAGDRKWKIEFYPTGTKQGTGTHLSIYLTLVDPETISDGTKIFVEFTIRIFDQLQGRHIAGKVTKWFSRSSSEHGWVKYVSMVYFTQPNSGLLLKDVCLVEADVCVHGITSAI

SEQ ID NO: 418 - protein, 309 aa, Arabidopsis thaliana
  misc_feature: Public GI ID no.18401489
  misc_feature: Bit score of 174.2 for HMM based on sequences of FIGURE 10.
  misc_feature (26)..(153): Pfam Name: MATH Pfam Description: MATH domain
  misc_feature: Functional Homolog Of Ceres SEEDLINE ID no. ME03280 at SEQ ID NO. 389
MASSGDYDEIIKSISDAPPTHYMVKIESFSLLTKHAIERYETESFEAGGYKWKLVLYPNGNKSKNTKDHVSVYLSLADSSSLSPGWEVYAVFRLYLLDQNKDNYLILQGNERRFHSVKREWGFDKFIPTGTFSDASNGYLMEDTCMFGADVFVSKERRSGRGECLSMIKDATSSKHVWKIENFSKLDKESYDSNAFFAGDRKWKIEFYPTGTKQGTGTHLSIYLTLVDPETISDGTKIFVEFTIRIFDQLQGRHIAGKVTKWFSRSSSEHGWVKYVSMVYFTQPNSGLLLKDVCLVEADVCVHGITSAI

SEQ ID NO: 419 - protein, 304 aa, Arabidopsis thaliana
  misc_feature: Public GI ID no.11994555
  misc_feature: Bit score of 164.4 for HMM based on sequences of FIGURE 10.
  misc_feature (21)..(148): Pfam Name: MATH Pfam Description: MATH domain
  misc_feature: Functional Homolog Of Ceres SEEDLINE ID no. ME03280 at SEQ ID NO. 389
MLAEIIKSISDAPPTHYMVKIESFSLLTKHAIERYETESFEAGGYKWKLVLYPNGNKSKNTKDHVSVYLSLADSSSLSPGWEVYAVFRLYLLDQNKDNYLILQGNERRFHSVKREWGFDKFIPTGTFSDASNGYLMEDTCMFGADVFVSKERRSGRGECLSMIKDATSSKHVWKIENFSKLDKESYDSNAFFAGDRKWKIEFYPTGTKQGTGTHLSIYLTLVDPETISDGTKIFVEFTIRIFDQLQGRHIAGKVTKWFSRSSSEHGWVKYVSMVYFTQPNSGLLLKDVCLVEADVCVHGITSAI

SEQ ID NO: 420 - DNA, 1195 bp, Populus balsamifera subsp. trichocarpa
  misc_feature: Ceres ANNOT ID no.1459922
  misc_feature: Encodes the peptide sequence at SEQ ID NO. 421
atggaagaaagaagctaccatccccagcttccagttccagcccttgttcctgatgcaacctttcaatctgctactgaggtaataagatcaaaaaggagcatccccccagcggactacactcttaaaatcgattccttttctttactgtcacaaatattctcaaagccagatgcacagagttaccaatctgacagctttgaggctggtggttacgagtggagattatctctgtacccctcaggggacagtatcagaaacgggaatggttacatctctttctacataattctggcagatcccgataacatgcctgctggttttgaaataaatgtcagctttaaattgttcgtatatgatcattttcaagacgagtatttgaccattcaagacatcaatggaagagtgagacgctttaacaaagtcaagatcgaacatggttttaccaaattcatttccctcgggacattcaaggaaccatctaatggatatttgctgaacgactcatgtgtatttggtgctgagatttttgtcataagaaatacaaataagggagatcgactgttactcgtacaagaacctgctcatcgttttcacacttggaagattcacaacttctccaagctcgacaaaaaaatattttctcatcaattttctgccggcggaagaaaatggcagatagggctttatcctagaggcaatcaatccctggacggagaacagaacttatctctgtacatattcctgacggattgtttcgtatttccaaaatatttcatgttgtctccttcatacatcctgacattgatgggaagatacggtctcaaagtccatcccaaggaacgaaaaatatatgctgaatgcaaaatccgtttattggatcagaaacgtggtcaacatatggaacgcgaagagaaaatgggaggaattgagcctcctcgtcgtcgtggggagttggtgagggtgttggaggaggaggaggaggaactgaaactggtaaggttctgcgctggcgctggtttggacctgcttggctgtgagtctgggattggttgtggaggggatgcagcccgcgtcattgcagatcacaccattcatgtcattcataacaatccaccggtagtgagcatgaacctatttggactccttgacgataccacagggagccctgatgatgacaatttgaatcagcgcctca

SEQ ID NO: 421 - protein, 398 aa, Populus balsamifera subsp. trichocarpa
  misc_feature: Ceres ANNOT ID no.1459922
  misc_feature: Bit score of 113.9 for HMM based on sequences of FIGURE 10.
  misc_feature (46)..(177): Pfam Name: MATH Pfam Description: MATH domain
  misc_feature: Functional Homolog Of Ceres SEEDLINE ID no. ME03280 at SEQ ID NO. 389
MEERSYHPQLPVPALVPDATFQSATEVIRSKRSIPPADYTLKIDSFSLLSQIFSKPDAQSYQSDSFEAGGYEWRLSLYPSGDSIRNGNGYISFYIILADPDNMPAGFEINVSFKLFVYDHFQDEYLTIQDINGRVRRFNKVKIEHGFTKFISLGTFKEPSNGYLLNDSCVFGAEIFVIRNTNKGDRLLLVQEPAHRFHTWKIHNFSKLDKKIFSHQFSAGGRKWQIGLYPRGNQSLDGEQNLSLYIFLTDCFVFPKYFMLSPSYILTLMGRYGLKVHPKERKIYAECKIRLLDQKRGQHMEREEKMGGIEPPRRRGELVRVLEEEEEELKLVRFCAGAGLDLLGCESGIGCGGDAARVIADHTIHVIHNNPPVVSMNLFGLLDDTTGSPDDDNLNQRL

SEQ ID NO: 422 - protein, 1116 aa, Oryza sativa subsp. japonica
  misc_feature: Public GI ID no.34395211
  misc_feature: Bit score of 849.8 for HMM based on sequences of FIGURE 10.
  misc_feature (84)..(204): Pfam Name: MATH Pfam Description: MATH domain
  misc_feature: Functional Homolog Of Ceres SEEDLINE ID no. ME03280 at SEQ ID NO. 389
MRVAWWTRAGGWSAAVGLRVGFFVRVVMWNQQQQQEEEEVLVPRQELPNGTQPMEAVVVPSEPAATVENQQIEDPPISRFTWTIENLSRVSTKKLYSEIFVVGGYKWRILIFPRGNNVEYLSMYLDVADSAVLPYGWTRYAQFSLSVVNQMHNKFTIRKETQHQFSARESDWGFTSFMPLGDLYNPSRGYLVNDTCIVEAEVAVCKVVDYWSYDSKKETGYVGLKNQVDSACQAVYHMPTTENDMPSGSIPLALQSLFYKLQYNDSSVSTKELTKSFGWDMHDSFMQHDVQELNRVLSEKLEDKMKKGILLWQVIVLSHHGHYVQTCPFDLIGVHSNADLQLDVKGCQDVYASFDKYVEVERLEGDNKYHAEQYGLQDAKKGVLFIDFPPVLQLQLKRFEYDFMRDTMVKINDRYEFPIQLDLDRDDGKYLSPDADRNVRNLYTLHSVLVHSGGVHGGHYYAFIRPTLSDQWFKFDDERVTKEDAKRALEEQYGGEEELPQTNPGLNNTPFKFTKYSNAYMLVYIRESDKDKIICNVDEKDIAEHLRIRLEKDREEKERRKKEKAEAHLYTIIKVARDDDLTTQIGKDIYFDLVDHDKVPSFRIQKQMPFTQFKEEVAKEFGIPTQFQRFWLWAKRQNHTYRPNRPLTPQEETHTVGQLKEAANKAHNAELKLFLEVELGLDLKPLPLPDKTREDILLFFKLYDPEKEQLRLFVKASGKPQDILPKLRKMAGFSQDEEIELYEEIKFEPNVMCEYIDNRLLFRACQLEDGDIVCFQKSPKPDTADQYRYPDVPSFLVYIRNRQVVHFRSLEKPKEDDFCLEMSKAFTYDEVVEKVAQKLGVDDPTKIRLTSHNCYSQQPKPQPIKYRGVERLLDMLIHYNQTSDILYYEVLDIPLPELQALKTLKVTYHHGTKDEVSVHSIRLPKNSTVGDVLNDIKSKVELSHPNAELRLLEVFYHKIYKIFAPNEKIENINDQYWTLRAEEVPEEEKNLGPFDRLIHVYHFTKDTQNQTQVQNFGEPFFMVIREDETLSSIKERIQKKLKVPDEDFSKWKFAYISLGRPDYFEDSDTVASRFQRNMYGAWEQYLGLEHPDTAPRKTHNANQNRHSFERPVKIYN

SEQ ID NO: 423 - DNA, 3330 bp, Populus balsamifera subsp. trichocarpa
  misc_feature: Ceres ANNOT ID no.1510886
  misc_feature: Encodes the peptide sequence at SEQ ID NO. 424
atgactctcatgactcctcctccgttaaatcaacaagaagacgacgagatgttggtcccacaaactgaatttgctgatggacctcagccaatggaagtagcacaagccgaaactgcaacagcagttgatgcacagtcggtggatgatccaccatctgctaggtttacatggacgattgataatttttcgaggctaaatgctaagaagctctactctgatgtttttgttgttggaggctacaagtggcggatattgatttttccaaagggtaacaatgtggatcatttatccatgtatctagatgttgctgattcagcaactttgccatatggctggagtcgatatgcgcagtttagcttgactgttatcaatcaacttcatcaaaagtactcaattcggaaagacacgcagcaccagttcaatgcacgtgagagtgattggggattcacttcattcatgcctcttggggaattgtatgaccctgggagagggtatcttgtaaatgacacgtgtgtggttgaagctgatgttgctgttcgtaaggtcattgattactggtcacatgattcgaagaaggagaccggttatgttggtctaaagaaccaaggagctacatgctacatgaactctctccttcagacgctgtatcatattccttatttcagaaaggctgtatatcatatgccaacaactgagaatgatatcccatcagggagcattcctctggctttgcagagtttgttttataaacttcaatacagtgacactagcgtagctacaaaagagttgacaaagtcttttggctgggatacatatgactctttcatgcagcatgatgtccaagaacttaatagggttctgtgtgaaaagcttgaagataaaatgaagggaactgttgtggagggcactatacaacagctatttgaagggcaccatatgaattatattgaatgcatcaatgttgactataagtcgacaagaaaggagtcattttatgatcttcagcttgatgtcaaaggctgtcgggatgtttatgcttcttttgataagtatgtggaggtggaacgtcttgaaggtgacaataaatatcatgctgaacaacatggattacaggatgctagaaagggtgtcctattcattgacttccccccagttctccaacttcaacttaaaaggttcgagtatgattttatgcgggatacaatggtgaagataaatgatcgctatgagttccctttgcaacttgatcttgatagagagaatgggaaatatttatcaccagaggctgaccgcagtgtccgcaatctatacacccttcacagtgttttggttcacagtggtggtgtgcatggtggacactactatgcttatatcagaccaactctctcagatcagtggttcaaatttgatgatgagcgggtgaccaaagaggatatcaaaagggcattagaggagcagtatggtggtgaggaagagttaccacagacaaatcctggcttcaacaactctcccttcaagtttacaaagtactcaaatgcttatatgcttgtgtatattcgtgaaagtgacaaggaaaaaataatctgtaatgtggacgagaaggacattgcagagcacctcaggataagattgaagaaagaacaggaggaaaaggagcaaaagagaaaggaaaaagcggaggcgcacttgtacaccataataaaggttgcacgcagtgaggatctacttgaacagattggcaaggatgtatattttgatcttgtggaccatgacaaagtacgaagtttccgtatccagaaacagataaccttcaaccttttcaaggaagaagttgctaaagaatttggtataccagtgcaacttcaacgtttttggctgtgggcaaagcgacaaaatcatacataccgtccaaatcggccactgactcctcaggaggaagcacagtctgttggacaattgagagaggtttctaataaggcaaataacgcggagctaaagctgtttctggaagcagaaattggacaggatttgcgacctgttcctccacctgagaagactaaagatgatatccttcttttctttaaactttatgatccatcgaaggaggaactccggtattcccacggtagcggcaagccgttggagatcctgacgaaactaaatgaaatcgctggctttgctcctgaccaggagattgaactttacgaggaaataaagtttgaacctaatgtcatgtgcgaacacattgacaagaggctcacttttcgttctagtcagcttgaagatggagatattgtttgctatcagaaaccccctccaatgggaagtgacgaacagtgccgctaccctgatgtgccttccttccttgagtacatgcacaatcgccaggttgttcgttttcgatctttggagaaatcgaaagaggatgaattctgtcttgattcaaagctccacacttatgatgatgttgcggaaagagtagctcaccatcttggcttggatgacccatccaaaattaggcttacatctcataactgttactcccagcaacctaaaccccagcccatcaaattccgaggagtggatcatttgtctgatatgctggtgcactacaatcagacatctgatattctatactatgaagtattagacatccctctaccagaattgcaaggccttaaaacattaaaagttgcttttcatcatgctactaaggatgaggtagtgattcataccattagattgccaaaacagagcactgtaggtgatgtcattaatgaccttaaggcaaaggtggagctgtctcatcctagtgctgaacttagattgcttgaggttttctatcacaagatctacaagatctttccacacaatgaaaaaatcgagaacattaatgatcaatactggacactacgtgcagaggaggttcctgaagaagagaaaaaccttgctcctcacgatcgcttgattcatgtctatcatttcatgaaagacacaactcaaaaccaggtggttcagaattttggagaaccatttttcctggtcattcacgagggtgagactttgactgaagtcaaaatgcgcatacagaaaaaattgcaggttcccgatgaagaattttcaaagtggaagtttgcttttttgtctctaggtcgccctgagtaccttcaagattcagacatcgtgtccagccgttttcagagaagggatgtttatggtgcttgggagcagtatcttggattggagcattctgacaatgctcctaaaaggtcatatgctgctaatcagaatcgtcatacatttgagaagccggtaaaaatctacaactag

SEQ ID NO: 424 - protein, 1093 aa, Populus balsamifera subsp. trichocarpa
  misc_feature: Ceres ANNOT ID no.1510886
  misc_feature: Bit score of 1046.6 for HMM based on sequences of FIGURE 10.
  misc_feature (43)..(163): Pfam Name: MATH Pfam Description: MATH domain
  misc_feature: Functional Homolog Of Ceres SEEDLINE ID no. ME03280 at SEQ ID NO. 389
MLVPQTEFADGPQPMEVAQAETATAVDAQSVDDPPSARFTWTIDNFSRLNAKKLYSDVFVVGGYKWRILIFPKGNNVDHLSMYLDVADSATLPYGWSRYAQFSLTVINQLHQKYSIRKDTQHQFNARESDWGFTSFMPLGELYDPGRGYLVNDTCVVEADVAVRKVIDYWSHDSKKETGYVGLKNQGATCYMNSLLQTLYHIPYFRKAVYHMPTTENDIPSGSIPLALQSLFYKLQYSDTSVATKELTKSFGWDTYDSFMQHDVQELNRVLCEKLEDKMKGTVVEGTIQQLFEGHHMNYIECINVDYKSTRKESFYDLQLDVKGCRDVYASFDKYVEVERLEGDNKYHAEQHGLQDARKGVLFIDFPPVLQLQLKRFEYDFMRDTMVKINDRYEFPLQLDLDRENGKYLSPEADRSVRNLYTLHSVLVHSGGVHGGHYYAYIRPTLSDQWFKFDDERVTKEDIKRALEEQYGGEEELPQTNPGFNNSPFKFTKYSNAYMLVYIRESDKEKIICNVDEKDIAEHLRIRLKKEQEEKEQKRKEKAEAHLYTIIKVARSEDLLEQIGKDVYFDLVDHDKVRSFRIQKQITFNLFKEEVAKEFGIPVQLQRFWLWAKRQNHTYRPNRPLTPQEEAQSVGQLREVSNKANNAELKLFLEAEIGQDLRPVPPPEKTKDDILLFFKLYDPSKEELRYSHGSGKPLEILTKLNEIAGFAPDQEIELYEEIKFEPNVMCEHIDKRLTFRSSQLEDGDIVCYQKPPPMGSDEQCRYPDVPSFLEYMHNRQVVRFRSLEKSKEDEFCLDSKLHTYDDVAERVAHHLGLDDPSKIRLTSHNCYSQQPKPQPIKFRGVDHLSDMLVHYNQTSDILYYEVLDIPLPELQGLKTLKVAFHHATKDEVVIHTIRLPKQSTVGDVINDLKAKVELSHPSAELRLLEVFYHKIYKIFPHNEKIENINDQYWTLRAEEVPEEEKNLAPHDRLIHVYHFMKDTTQNQVVQNFGEPFFLVIHEGETLTEVKMRIQKKLQVPDEEFSKWKFAFLSLGRPEYLQDSDIVSSRFQRRDVYGAWEQYLGLEHSDNAPKRSYAANQNRHTFEKPVKIYN

SEQ ID NO: 425 - DNA, 3711 bp, Populus balsamifera subsp. trichocarpa
  misc_feature: Ceres ANNOT ID no.1518676
  misc_feature: Encodes the peptide sequence at SEQ ID NO. 426
atgcaacaagaagacgatgagatgttggtcccacacactgaatttactgagggacctcagcctatggaagtagcacaagcagaaacagcgacggcagttgatgcacagtcagtggatgatccaccatcagctaggtttacatggacaattgataatttttcgaggtttaatactaagaagctttactccgatgtttttgttgttggaggctacaagtggcggatactggtttttccaaaggggaacaatgtggatcatttatccatgtatttagatgttgcagattcaactaatttgccatatgggtggagtcgatatgcgcagtttagcttgactgtcatcaatcaacttcaccaaaaatattcaattcggaaagacacgcagcaccagttcaatgcacgtgagagtgattggggcttcacttcatttatgccacttggggaattgtatgaccctgggagagggtatcttgtaaatgactcatgcatagttgaagctgatgttgctgttcgtagggttattgattactggtcacatgattcaaaaaaggagaccggttatgttggtctcaagaaccaaggagctacatgctacatgaactctctccttcaaacgctgtatcatattccttattttagaaaggctgtatatcatatgccaacaactgagaatgatatcccatcagggagcattccactggcgttgcagagtttgttttataaacttcaatacagtgacactagtgtagcaacaaaagagttgacaaagtctttcggctgggatacatatgactctttcatgcagcatgatgtccaagaacttaatagggttctttctgaaaagcttgaagataaaatgaagatttttgttacagaggataatagtaaattatccgagattcatcttgtggacctcatggaattttatatatatatatatataattgtagatcttcagcttgatgtcaaaggctgtcgggatgtttatgcttcttttgataagtatgtggaggtggaacgtcttgaaggtgacaataaatatcatgctgaacaacatggattacaggatgctaggaagggtgtcctattcattgacttcccccctgttctccaacttcaacttaaaaggtttgagtatgattttatgcgggatacgatggtgaagataaatgatcgctatgagttccctttgcaacttgatctggatagagagaatggaaaatatttatcacctgaggccgactgcagtgtccgcaatctctacacccttcacagtgttttggttcacagtggcggcgtgcatggtggacactactatgcttatatcagaccaactctatcagatcagtggttcaaatttgatgatgagcgggtaaccaaagaggatgtgaaaagggcattagaggagcagtatggtggtgaggaagagttaccacagacaaatcctggctttaacaactctcccttcaagtttacaaaatactcgaatgcttatatgcttgtgtatatacgtgaaagtgacaaggaaaaagtaatctgtaatgtggatgagaaggatattgcagagcacctcaggataagactgaagaaagaacaggaagagaaagagcaaaagagaaaggaaaaagctgaggcccacttgtacactatcataaaggttgcacgtagtgaggatctacttgaacagattggcaaagatgtatattttgatctcgtggatcatgacaaagttcgtagtttccgtatccagaaacaaataacctttaaccttttcaaggaagaagttgctaaagaatttggtattccagtgcaatttcaacgtttttggctgtgggcaaaacgacaaaatcatacataccgtccaaatcggccactgactcctcaggaggaatcacaatctgttggacaattgagagaggtttctaataaggcaaataatgcagagctgaagttgtttctggaagtagaagttgggcaggattcgcgacctgttcctccacctgagaagactaaagaggatatccttcttttctttaaactttatgatccatcaaaagagaaactccggtatgttgggaggctgtttgtgaagggcagtggtaaaccattggagatcctgacaaaattaaatgaaatggctggctttgctcctgaccaggagattgaactttatgaggaaataaaatttgaacctaatgtcatgtgtgaacacattgacaagaggctcacttttcgttctagccagcttgaagatggagatattgtttgctttcagaaaccccctcaaatgggaagcaatgaacagtgccgctaccctgatgtgccttcattcctcgagtatatgcacaatcgccaggtatgccatgttttcattctgcttgctggctgcttggcatgtggtgtaatggcacattttcaaaccatagttgtcagacttggcacgaaaagaggccgggtaactggttctaccaggcagtctcaggagttgaatacagcatcagcaaagaatctgaatgaagaagacctaaattggcatagaaaacctaactcgactagatacagtgatgagaaatcaaatggagatgaacttgaatgcttaaccaagttagtattggtcttgacctggtttcactgggatacctggtctgggtcgctaaaaaccctgccaggtcacctgggtttttctggtgaatgtcttggacagttaaaatggaaacccagatgggtccatggctcgagtctctgggttgttcgatttcgatctttggagaaatcaaaagaggatgaattttgtcttgagctatcaaagctccacacttatgatgatgttgtggaaagagtagctaaccatcttggcttggatgacccatccaaaattaggcttacatcccataactgttactcccagcaacctaaacctcaacccatcaagtaccggggagtggatcatttatctgatatgctggtgcactacaatcagacatctgatattctatactatgaagtattggacatccctcttccagaactgcaaggccttaaaacattaaaggttgcatttcatcatgctaccaaggatgaggtagtgattcataccatcagattgccaaaacagagcactgtaggtgatgtcatcaatgaccttaagacaaaggtggagctgtctcatcccagtgctgaacttagattgcttgaggttttctatcacaagatctacaagtatgcaacctcatcttttcagatctttccacataatgaaaaaatcgagaacattaatgatcaatactggacactacgtgcagaggagatacctgaagaagagaaaaaccttggtcctcatgatcgtttgattcatgtatatcatttcatgaaagacacaactcaaaaccaggtggttcagaattttggagaaccatttttcctggtcattcatgagggcgaggctttagctgacgtcaaaatgcgtgtacagagaaaattgcaggttcctgatgaagaattttcaaagtggaagtttgcatttttgtcactaggtcgccccgagtaccttcaagactcagacattgtgtccaatcgttttcagagaagggacatttatggtgcctgggagcaatatcttggactcgagcattctgacaatgctcccaaaaggtcatatgctgctaatcagaatcgtcatacatttgagaagccggtaaaaatctacaattag

SEQ ID NO: 426 - protein, 1215 aa, Populus balsamifera subsp. trichocarpa
  misc_feature: Ceres ANNOT ID no.1518676
  misc_feature: Bit score of 879.2 for HMM based on sequences of FIGURE 10.
  misc_feature (29)..(149): Pfam Name: MATH Pfam Description: MATH domain
  misc_feature: Functional Homolog Of Ceres SEEDLINE ID no. ME03280 at SEQ ID NO. 389
MEVAQAETATAVDAQSVDDPPSARFTWTIDNFSRFNTKKLYSDVFVVGGYKWRILVFPKGNNVDHLSMYLDVADSTNLPYGWSRYAQFSLTVINQLHQKYSIRKDTQHQFNARESDWGFTSFMPLGELYDPGRGYLVNDSCIVEADVAVRRVIDYWSHDSKKETGYVGLKNQGATCYMNSLLQTLYHIPYFRKAVYHMPTTENDIPSGSIPLALQSLFYKLQYSDTSVATKELTKSFGWDTYDSFMQHDVQELNRVLSEKLEDKMKIFVTEDNSKLSEIHLVDLMEFYIYIYIIVDLQLDVKGCRDVYASFDKYVEVERLEGDNKYHAEQHGLQDARKGVLFIDFPPVLQLQLKRFEYDFMRDTMVKINDRYEFPLQLDLDRENGKYLSPEADCSVRNLYTLHSVLVHSGGVHGGHYYAYIRPTLSDQWFKFDDERVTKEDVKRALEEQYGGEEELPQTNPGFNNSPFKFTKYSNAYMLVYIRESDKEKVICNVDEKDIAEHLRIRLKKEQEEKEQKRKEKAEAHLYTIIKVARSEDLLEQIGKDVYFDLVDHDKVRSFRIQKQITFNLFKEEVAKEFGIPVQFQRFWLWAKRQNHTYRPNRPLTPQEESQSVGQLREVSNKANNAELKLFLEVEVGQDSRPVPPPEKTKEDILLFFKLYDPSKEKLRYVGRLFVKGSGKPLEILTKLNEMAGFAPDQEIELYEEIKFEPNVMCEHIDKRLTFRSSQLEDGDIVCFQKPPQMGSNEQCRYPDVPSFLEYMHNRQVCHVFILLAGCLACGVMAHFQTIVVRLGTKRGRVTGSTRQSQELNTASAKNLNEEDLNWHRKPNSTRYSDEKSNGDELECLTKLVLVLTWFHWDTWSGSLKTLPGHLGFSGECLGQLKWKPRWVHGSSLWVVRFRSLEKSKEDEFCLELSKLHTYDDVVERVANHLGLDDPSKIRLTSHNCYSQQPKPQPIKYRGVDHLSDMLVHYNQTSDILYYEVLDIPLPELQGLKTLKVAFHHATKDEVVIHTIRLPKQSTVGDVINDLKTKVELSHPSAELRLLEVFYHKIYKYATSSFQIFPHNEKIENINDQYWTLRAEEIPEEEKNLGPHDRLIHVYHFMKDTTQNQVVQNFGEPFFLVIHEGEALADVKMRVQRKLQVPDEEFSKWKFAFLSLGRPEYLQDSDIVSNRFQRRDIYGAWEQYLGLEHSDNAPKRSYAANQNRHTFEKPVKIYN

SEQ ID NO: 427 - DNA, 3813 bp, Populus balsamifera subsp. trichocarpa
  misc_feature: Ceres ANNOT ID no.1465343
  misc_feature: Encodes the peptide sequence at SEQ ID NO. 428
atgcaacaagaagacgatgagatgttggtcccacacactgaatttactgagggacctcagcctatggaagtagcacaagcagaaacagcgacggcagttgatgcacagtcagtggatgatccaccatcagctaggtttacatggacaattgataatttttcgaggtttaatactaagaagctttactccgatgtttttgttgttggaggctacaagtggcggatactggtttttccaaaggggaacaatgtggatcatttatccatgtatttagatgttgcagattcaactaatttgccatatgggtggagtcgatatgcgcagtttagcttgactgtcatcaatcaacttcaccaaaaatattcaattcggaaagacacgcagcaccagttcaatgcacgtgagagtgattggggcttcacttcatttatgccacttggggaattgtatgaccctgggagagggtatcttgtaaatgactcatgcatagttgaagctgatgttgctgttcgtagggttattgattactggtcacatgattcaaaaaaggagaccggttatgttggtctcaagaaccaaggagctacatgctacatgaactctctccttcaaacgctgtatcatattccttattttagaaaggctgtatatcatatgccaacaactgagaatgatatcccatcagggagcattccactggcgttgcagagtttgttttataaacttcaatacagtgacactagtgtagcaacaaaagagttgacaaagtctttcggctgggatacatatgactctttcatgcagcatgatgtccaagaacttaatagggttctttctgaaaagcttgaagataaaatgaagggaactgtcgtggagggcactatacaacagttatttgaagggcaccatatgaattatattgaatgcatcaatgttgactataagtcgacaagaaaggagtcattttatgatcttcagcttgatgtcaaaggctgtcgggatgtttatgcttcttttgataagtatgtggaggtggaacgtcttgaaggtgacaataaatatcatgctgaacaacatggattacaggatgctaggaagggtgtcctattcattgacttcccccctgttctccaacttcaacttaaaaggtttgagtatgattttatgcgggatacgatggtgaagataaatgatcgctatgagttccctttgcaacttgatctggatagagagaatggaaaatatttatcacctgaggccgactgcagtgtccgcaatctctacacccttcacagtgttttggttcacagtggcggcgtgcatggtggacactactatgcttatatcagaccaactctatcagatcagtggttcaaatttgatgatgagcgggtaaccaaagaggatgtgaaaagggcattagaggagcagtatggtggtgaggaagagttaccacagacaaatcctggctttaacaactctcccttcaagtttacaaaatactcgaatgcttatatgcttgtgtatatacgtgaaagtgacaaggaaaaagtaatctgtaatgtggatgagaaggatattgcagagcacctcaggataagactgaagaaagaacaggaagagaaagagcaaaagagaaaggaaaaagctgaggcccacttgtacactatcataaaggttgcacgtagtgaggatctacttgaacagattggcaaagatgtatattttgatctcgtggatcatgacaaagttcgtagtttccgtatccagaaacaaataacctttaaccttttcaaggaagaagttgctaaagaatttggtattccagtgcaatttcaacgtttttggctgtgggcaaaacgacaaaatcatacataccgtccaaatcggccactgactcctcaggaggaatcacaatctgttggacaattgagagaggtttctaataaggcaaataatgcagagctgaagttgtttctggaagtagaagttgggcaggattcgcgacctgttcctccacctgagaagactaaagaggatatccttcttttctttaaactttatgatccatcaaaagagaaactccggtatgttgggaggctgtttgtgaagggcagtggtaaaccattggagatcctgacaaaattaaatgaaatggctggctttgctcctgaccaggagattgaactttatgaggaaataaaatttgaacctaatgtcatgtgtgaacacattgacaagaggctcacttttcgttctagccagcttgaagatggagatattgtttgctttcagaaaccccctcaaatgggaagcaatgaacagtgccgctaccctgatgtgccttcattcctcgagtatatgcacaatcgccaggtatgccatgttttcattctgcttgctggctgcttggcatgtggtgtaatggcacattttcaaaccatagttgtcagacttggcacgaaaagaggccgggtaactggttctaccaggcagtctcaggagttgaatacagcatcagcaaagaatctgaatgaagaagacctaaattggcatagaaaacctaactcgactagatacagtgatgagaaatcaaatggagatgaacttgaatgcttaaccaagttagtattggtcttgacctggtttcactgggatacctggtctgggtcgctaaaaaccctgccaggtcacctgggtttttctggtgaatgtcttggacagttaaaatggaaacccagatgggtccatggctcgagtctctgggttgttcgatttcgatctttggagaaatcaaaagaggatgaattttgtcttgagctatcaaagctccacacttatgatgatgttgtggaaagagtagctaaccatcttggcttggatgacccatccaaaattaggcttacatcccataactgttactcccagcaacctaaacctcaacccatcaagtaccggggagtggatcatttatctgatatgctggtgcactacaatcagacatctgatattctatactatgaagtattggacatccctcttccagaactgcaaggccttaaaacattaaaggttgcatttcatcatgctaccaaggatgaggtagtgattcataccatcagattgccaaaacagagcactgtaggtgatgtcatcaatgaccttaagacaaaggtggagctgtctcatcccagtgctgaacttagattgcttgaggttttctatcacaagatctacaagtatgcaacctcatcttttcagatctttccacataatgaaaaaatcgagaacattaatgatcaatactggacactacgtgcagaggagatacctgaagaagagaaaaaccttggtcctcatgatcgtttgattcatgtatatcatttcatgaaagacacaactcaaaaccaggtggttcagaattttggagaaccatttttcctggtcattcatgagggcgaggctttagctgacgtcaaaatgcgtgtacagagaaaattgcaggttcctgatgaagaattttcaaagtggaagtttgcatttttgtcactaggtcgccccgagtaccttcaagactcagacattgtgtccaatcgttttcagagaagggacatttatggtgcctgggagcaatatcttggactcgagcattctgacaatgctcccaaaaggtcatatgctgctaatcagaatcgtcatacatttgagaagccgagtagtctggtttcacatcgaagtgtttgggtaacatatgcgatcgagattgaaagtgaatctccaggccatcatctcaaccatttgtcggtggactag

SEQ ID NO: 428 - protein, 1249 aa, Populus balsamifera subsp. trichocarpa
  misc_feature: Ceres ANNOT ID no.1465343
  misc_feature: Bit score of 1007.7 for HMM based on sequences of FIGURE 10.
  misc_feature (29)..(149): Pfam Name: MATH Pfam Description: MATH domain
  misc_feature: Functional Homolog Of Ceres SEEDLINE ID no. ME03280 at SEQ ID NO. 389
MEVAQAETATAVDAQSVDDPPSARFTWTIDNFSRFNTKKLYSDVFVVGGYKWRILVFPKGNNVDHLSMYLDVADSTNLPYGWSRYAQFSLTVINQLHQKYSIRKDTQHQFNARESDWGFTSFMPLGELYDPGRGYLVNDSCIVEADVAVRRVIDYWSHDSKKETGYVGLKNQGATCYMNSLLQTLYHIPYFRKAVYHMPTTENDIPSGSIPLALQSLFYKLQYSDTSVATKELTKSFGWDTYDSFMQHDVQELNRVLSEKLEDKMKGTVVEGTIQQLFEGHHMNYIECINVDYKSTRKESFYDLQLDVKGCRDVYASFDKYVEVERLEGDNKYHAEQHGLQDARKGVLFIDFPPVLQLQLKRFEYDFMRDTMVKINDRYEFPLQLDLDRENGKYLSPEADCSVRNLYTLHSVLVHSGGVHGGHYYAYIRPTLSDQWFKFDDERVTKEDVKRALEEQYGGEEELPQTNPGFNNSPFKFTKYSNAYMLVYIRESDKEKVICNVDEKDIAEHLRIRLKKEQEEKEQKRKEKAEAHLYTIIKVARSEDLLEQIGKDVYFDLVDHDKVRSFRIQKQITFNLFKEEVAKEFGIPVQFQRFWLWAKRQNHTYRPNRPLTPQEESQSVGQLREVSNKANNAELKLFLEVEVGQDSRPVPPPEKTKEDILLFFKLYDPSKEKLRYVGRLFVKGSGKPLEILTKLNEMAGFAPDQEIELYEEIKFEPNVMCEHIDKRLTFRSSQLEDGDIVCFQKPPQMGSNEQCRYPDVPSFLEYMHNRQVCHVFILLAGCLACGVMAHFQTIVVRLGTKRGRVTGSTRQSQELNTASAKNLNEEDLNWHRKPNSTRYSDEKSNGDELECLTKLVLVLTWFHWDTWSGSLKTLPGHLGFSGECLGQLKWKPRWVHGSSLWVVRFRSLEKSKEDEFCLELSKLHTYDDVVERVANHLGLDDPSKIRLTSHNCYSQQPKPQPIKYRGVDHLSDMLVHYNQTSDILYYEVLDIPLPELQGLKTLKVAFHHATKDEVVIHTIRLPKQSTVGDVINDLKTKVELSHPSAELRLLEVFYHKIYKYATSSFQIFPHNEKIENINDQYWTLRAEEIPEEEKNLGPHDRLIHVYHFMKDTTQNQVVQNFGEPFFLVIHEGEALADVKMRVQRKLQVPDEEFSKWKFAFLSLGRPEYLQDSDIVSNRFQRRDIYGAWEQYLGLEHSDNAPKRSYAANQNRHTFEKPSSLVSHRSVWVTYAIEIESESPGHHLNHLSVD

SEQ ID NO: 429 - DNA, 3327 bp, Populus balsamifera subsp. trichocarpa
  misc_feature: Ceres ANNOT ID no.1507750
  misc_feature: Encodes the peptide sequence at SEQ ID NO. 430
atgactatgatgactccttcaccgttggatcaagaagacgaggagatgctcgtgccgcattcagatttagttgaaggcccacaaccaatagaagtggcacaagtggagcaaactagtacggtggaaaatcagccagtggaggatcccccgtccatgaaatttacgtggactattgagaattttactaggttgaacacaaagaagcattattccgatgtatttattgttggcagttacaaatggcgagtactgatcttccctaaaggaaacaatgtggaccacttgtcgatgtatttggatgttgctgattctacgactttgccatatggatggagtagatatgcgcaattcagcttggccgtggtcaatcaaattcataacaagtactcaattagaaaggacacacaacatcagttcaacgcaagagagagtgactggggttttacatctttcatgcctctgagtgaactttatgatccaagtagaggatatctagtgaacgatacagttgttattgaagctgaagttgctgtccgtaagcttctagattattggtcctatgactcgaagaaggagacaggctatgtaggactgaagaaccagggagcaacatgttacatgaactctctcctacagactcagtaccatattccttacttccgaaaggctgtgtaccacatgccaacaactgagaatgacatgcctacaggaagcattccattggccctgcagagtttattctataagcttcaatataatgataccagtgttgcaacaaaggaactgaccaaatcttttggctgggatacatatgattccttcatgcaacatgatgtgcaagaactcaacagagtcctatgtgagaagctagaggataaaatgaaggggactgttgtggaggggactatacagcagttgtttgagggtcaccatatgaactacattgagtgcatcaatgtggactacaaatctacaaggaaggagtcattttacgatctccagcttgatgtgaaaggttgtcgagatgtttatgcttcttttgacaaatatgtggaagttgaacggcttgagggtgataacaaataccatgctgaagaacatggtttgcaggatgcaaagaagggtgtcttgtttattgacttcccccctgttcttcaactccaattaaagcgttttgaatatgattttatgcgtgacaccatggtgaagattaatgatcgctatgaatttcctcttcaacttgacctggatagggagaatgggaaatatttatcacctgatgcagacaggagtgttcgcaatctatacacacttcacagcgttttggttcatagcggaggggtgcatggtggacattattatgcttttatcaggccaaccctctctgatcagtggttcaaatttgatgatgaacgggtgacaaaagaagatatgaagagggcattagaagaacagtatggtggtgaggaagagctacctcagaccaatcctggctttaacaatactccatttaaattcacaaaatactcaaatgcatacatgcttgtgtatatacgggaaagtgacaaggacaagataatttgtaatgtcgatgagaaagatattgctgaacacttgaggataaggctgaagaaagaacaagaagaaaaagaagacaagagaagatataaagcacaagctcacctttacacaattataaaggtcgcacgagatgaggaccttaaagagcaaattggaaaggatatttattttgaccttgtggatcatgacaaagtccataacttccggattcagaaacagatgcagtttagtctttttaaggaggaggttgctaaagagtttggtataccagtacaatttcagcgattttggatatgggcaaagcgccaaaaccacacatataggccaaatcgatcattgacaccccaggaagaagttggacagctgagagaggtgtcaaataagacgcataatgctgaattaaaattgttcttggaaatcgagcttggactggatttacgtcccattgcgccacctgaaaaaactaaagaagatattctgcttttcttcaagctttatgaccctgaaaaacaagaattgcggcttttcgtgaagagttctggcaagccaatagaaattctagcaaagctcaatcaaatggctggctttccacccgatgaagagattgaactttatgaggaaatcaagttcgagccttgtgtcatgtgtgaacatcttgataatagggcctcatttcgaataagtcagatcgaagatggggacataatatgctttcagaaatctcctcctcttgaaaaggaagaagaatgtcgatatccagatgtgccttcatatttggaatatgtgcacaatcgacagatagttcatttccgatctctggaaaagccgaaggaggatgatttttgtctagagttgtcgaaggtacatacttatgatgatgttgtcgaaagagtggcccgccaaattggcctggatgatccatccaaaatcaggttgacatcccacaactgctactctcagcagcctaagccgcaaccaattaaatatcgaggagtggagcatctatcagatatgttagttcactacaatcagacttctgatatcttgtattacgaagttctggatattcctcttccagaattgcaaggtctaaaaaatttgaaagttgctttccatcatgctattaaagacgaagtggtaattcataacattagattgcctaaacaaagcaccgtgggagatgtgattaatgaacttaaaacgaaggtagaattgtctcacccaaatgctgaacttcgactgcttgaagttttctatcacaagatttataagatctttccacccaatgaaaaaatcgagaatataaatgatcagtattggacattacgggcagaggagatccctgaggaagaaaaaaatcttggtccccaagatcgcctgattcacgtgtatcacttcacaaaagagtctggacagaatcaaatgcaagtacagaattttggtgaaccctttttcttggtcatccatgaaggtgaaactttagctcaagttaaaatgcgcatacaaaagaaactgcaggtccctgacgaggagtttgcaaagtggaaatttgcatttctgtcgctgggtcgtccagagtacttgcaggattctgatgttgtgttcacccgctttcagagaagagatgtttatggcgcttgggagcagtaccttggcttggagcaccctgataatactcctaaaaggtcttatgcagttaatcagaaccgccacacatttgagaagccagttaaaatatacaattag

SEQ ID NO: 430 - protein, 1105 aa, Populus balsamifera subsp. trichocarpa
  misc_feature: Ceres ANNOT ID no.1507750
  misc_feature: Bit score of 1098.6 for HMM based on sequences of FIGURE 10.
  misc_feature (55)..(175): Pfam Name: MATH Pfam Description: MATH domain
  misc_feature: Functional Homolog Of Ceres SEEDLINE ID no. ME03280 at SEQ ID NO. 389
MTPSPLDQEDEEMLVPHSDLVEGPQPIEVAQVEQTSTVENQPVEDPPSMKFTWTIENFTRLNTKKHYSDVFIVGSYKWRVLIFPKGNNVDHLSMYLDVADSTTLPYGWSRYAQFSLAVVNQIHNKYSIRKDTQHQFNARESDWGFTSFMPLSELYDPSRGYLVNDTVVIEAEVAVRKLLDYWSYDSKKETGYVGLKNQGATCYMNSLLQTQYHIPYFRKAVYHMPTTENDMPTGSIPLALQSLFYKLQYNDTSVATKELTKSFGWDTYDSFMQHDVQELNRVLCEKLEDKMKGTVVEGTIQQLFEGHHMNYIECINVDYKSTRKESFYDLQLDVKGCRDVYASFDKYVEVERLEGDNKYHAEEHGLQDAKKGVLFIDFPPVLQLQLKRFEYDFMRDTMVKINDRYEFPLQLDLDRENGKYLSPDADRSVRNLYTLHSVLVHSGGVHGGHYYAFIRPTLSDQWFKFDDERVTKEDMKRALEEQYGGEEELPQTNPGFNNTPFKFTKYSNAYMLVYIRESDKDKIICNVDEKDIAEHLRIRLKKEQEEKEDKRRYKAQAHLYTIIKVARDEDLKEQIGKDIYFDLVDHDKVHNFRIQKQMQFSLFKEEVAKEFGIPVQFQRFWIWAKRQNHTYRPNRSLTPQEEVGQLREVSNKTHNAELKLFLEIELGLDLRPIAPPEKTKEDILLFFKLYDPEKQELRLFVKSSGKPIEILAKLNQMAGFPPDEEIELYEEIKFEPCVMCEHLDNRASFRISQIEDGDIICFQKSPPLEKEEECRYPDVPSYLEYVHNRQIVHFRSLEKPKEDDFCLELSKVHTYDDVVERVARQIGLDDPSKIRLTSHNCYSQQPKPQPIKYRGVEHLSDMLVHYNQTSDILYYEVLDIPLPELQGLKNLKVAFHHAIKDEVVIHNIRLPKQSTVGDVINELKTKVELSHPNAELRLLEVFYHKIYKIFPPNEKIENINDQYWTLRAEEIPEEEKNLGPQDRLIHVYHFTKESGQNQMQVQNFGEPFFLVIHEGETLAQVKMRIQKKLQVPDEEFAKWKFAFLSLGRPEYLQDSDVVFTRFQRRDVYGAWEQYLGLEHPDNTPKRSYAVNQNRHTFEKPVKIYN

SEQ ID NO: 431 - protein, 1148 aa, Oryza sativa subsp. indica
  misc_feature: Public GI ID no.125534834
  misc_feature: Bit score of 920.4 for HMM based on sequences of FIGURE 10.
  misc_feature (61)..(181): Pfam Name: MATH Pfam Description: MATH domain
  misc_feature: Functional Homolog Of Ceres SEEDLINE ID no. ME03280 at SEQ ID NO. 389
MTMMTPPPLEPEEDEMLVPHQELVAADAAQPMEVVAQTEAASTAESQPAEDPQTSRFTWTIENFTRINAKKHYSDAFVVGGYKWRVLIFPKGNNVDHFSMYLDVADSANLPYGWSRYAQFSLAVVNQIQQKYTIRKDTQHQFNARESDWGFTSFMPLSELYDPSRGYLVDDTVVVEAEVAVRKMVDYWTYDSKKETGYVGLKNQGATCYMNSLLQTLYHIPYFRKAVYHMPTTENDMPSGSIPLALQSLFYKLQYSDNSVATKELTKSFGWDTYDSFMQHDVQELNRVLCEKLEDKMKVTNLRTVVEGTIEKLFEGHHINYIECINVDYKSNRKESFYDLQLDVKGCRDVYASFDKYVEVERLEGDNKYHAENHGLQDAKKGVLFLDFPPVLQLQLKRFEYDYMRDTMVKINDRYEFPLQLDLDRDDGKYLVQMQIELMVISYHLSKEVCGVRLPEENHMPYALLLYKFDDERVTKEDTKKALEEQYGGEEELPQINPGFNNAPFKFTKYSNAYMLVYIRESDKDKIMCNVDEKDIAEHLRVRLKKEQEEKEHKKKEKAEAHLYTIIKVARDENLKEQIGKDIYFDLVDHEKVRSFRIQKQLPFTTFKEEVAKEYGIPVQFQRFWLWAKRQNHTYRPNRPLSPHEETQSVGQLREVSNKAHNAELKLFLEVELGPDLRPLPPPEKSKEDILLFFKLYNPEKEELCFVGRLFVKALGKPSEILTKLNEMAGFVPNEEVELYEARAKFMMLYLWDNLVYVTPLRRVLGEIKFEPNVMCEHIDKKATFRASQLEDGDIICFQKSPIPDSDTQMRYPDVPSYLEYVHNRQVQGVYFLSVVHFRLLEKPKDDDFSLELSKLHTYDDVVERVARQLGVDDPAKIRLTSHNCYSQQPKPQPIRYRGVEHLLDMLIHYNQTSDILYYEVLDIPLPELQGLKTLKVAFHHATKDEVVIHSIRLPKNSTIADVINDLKTKVELSSPSAELRLLEVFYHKIYKIFPLHEKIENINDQYWTLRAEEIPEEEKNLGPNDRLIHVYHFMKDPLQNQQIQNFGDPFYLAIREGETLAEVKERIQKKLQVPDEEFCKWKFAFISMNRPDYLQDSDVVSARFQRRDVYGAWEQYLGLEHADTAPKRAYTANQNRHTYEKPVRIYN

SEQ ID NO: 432 - protein, 1397 aa, Oryza sativa subsp. japonica
  misc_feature: Public GI ID no.125577575
  misc_feature: Bit score of 965.3 for HMM based on sequences of FIGURE 10.
  misc_feature (61)..(181): Pfam Name: MATH Pfam Description: MATH domain
  misc_feature: Functional Homolog Of Ceres SEEDLINE ID no. ME03280 at SEQ ID NO. 389
MTMMTPPPLEPEEDEMLVPHQELVAADAAQPMEVVAQTEAASTAESQPAEDPQTSRFTWTIENFTRINAKKHYSDAFVVGGYKWRVLIFPKGNNVDHFSMYLDVADSANLPYGWSRYAQFSLAVVNQIQQKYTIRKDTQHQFNARESDWGFTSFMPLSELYDPSRGYLVDDTVVVEAEVAVRKMVDYWTYDSKKETGYVGLKNQGATCYMNSLLQTLYHIPYFRKAVYHMPTTENDMPSGSIPLALQSLFYKLQYSDNSVATKELTKSFGWDTYDSFMQHDVQELNRVLCEKLEDKMKVTNLRTVVEGTIEKLFEGHHINYIECINVDYKSNRKESFYDLQLDVKGCRDVYASFDKYVEVERLEGDNKYHAENHGLQDAKKGVLFLDFPPVLQLQLKRFEYDYMRDTMVKINDRYEFPLQLDLDRDDGKYLAPDADRSIRNLYALHRYKFDDERVTKEDTKKALEEQYGGEEELPQINPGFNNAPFKFTKYSNAYMLVYIRESDKDKIMCNVDEKDIAEHLRVRLKKEQEEKEHKKKEKAEAHLYTIIKVARDENLKEQIGKDIYFDLVDHEKVRSFRIQKQLLFTTFKEEVAKEYGIPVQFQRFWLWAKRQNHTYRPNRPLSPHEETQSVGQLREVSNKAHNAELKLFLEVELGPDLRPLPPPEKSKEDILLFFKLYNPEKEELCFVGRLFVKALGKPSEILTKLNEMAGFVPNEEIELYEARAKFMMLYLWDNLVYVTPLRRVLGEIKFEPNVMCEHIDKKATFRASQLEDGDIICFQKSPIPDSDTQMRYPDVPSYLEYVHNRQVVHFRLLEKPKDDDFSLEMSKLHTYDDVVERVARQLGVDDPAKIRLTSHNCYSQQPKPQPIRYRGVEHLLDMLIHYNQTSDILYYEVLDIPLPELQGLKTLKVAFHHATKDEVVIHSIRLPKNSTIADVINDLKTKVELSSPSAELRLLEVFYHKIYKIFPLHEKIENINDQYWTLRAEEIPEEEKNLGPNDRLIHVYHFMKDPLQNQQIQNFGDPFYLAIREGETLAEVKERIQKKLQVPDEEFCKWKFAFISMNRPDYLQDSDVVSARFQRRDVYGAWEQYLGLEHADTAPKRAYTANQKKLTRITAAVSAALGSVIVIADEIFASTYILTILSKKLYLMSRIKFGVTRSIFFSRHYDLNKAPVHLTLQLPTSPMDNPTPSSSSGGGGAAAAANASSDEHRKTSPATAADFFDEEHTFDDILLPVDLFDFTHGLDAGDGCYIENIFHHLNGQEMIPQSIRPQPTNLVRPITVPEDFDRFAALTRYREKKRNIKFIKKADYSARKEVALRMKRSKGKFAPRVQTSENSLAHRKGITFCTNCGESSDATPMMRHAPNGTKSFCNACGLMWANSRKIRKIRNPTSGEQEDQ

SEQ ID NO: 433 - protein, 1451 aa, Oryza sativa subsp. japonica
  misc_feature: Public GI ID no.77551602
  misc_feature: Bit score of 965.3 for HMM based on sequences of FIGURE 10.
  misc_feature (61)..(181): Pfam Name: MATH Pfam Description: MATH domain
  misc_feature: Functional Homolog Of Ceres SEEDLINE ID no. ME03280 at SEQ ID NO. 389
MTMMTPPPLEPEEDEMLVPHQELVAADAAQPMEVVAQTEAASTAESQPAEDPQTSRFTWTIENFTRINAKKHYSDAFVVGGYKWRVLIFPKGNNVDHFSMYLDVADSANLPYGWSRYAQFSLAVVNQIQQKYTIRKDTQHQFNARESDWGFTSFMPLSELYDPSRGYLVDDTVVVEAEVAVRKMVDYWTYDSKKETGYVGLKNQGATCYMNSLLQTLYHIPYFRKAVYHMPTTENDMPSGSIPLALQSLFYKLQYSDNSVATKELTKSFGWDTYDSFMQHDVQELNRVLCEKLEDKMKVTNLRTVVEGTIEKLFEGHHINYIECINVDYKSNRKESFYDLQLDVKGCRDVYASFDKYVEVERLEGDNKYHAENHGLQDAKKGVLFLDFPPVLQLQLKRFEYDYMRDTMVKINDRYEFPLQLDLDRDDGKYLAPDADRSIRNLYALHRYKFDDERVTKEDTKKALEEQYGGEEELPQINPGFNNAPFKFTKYSNAYMLVYIRESDKDKIMCNVDEKDIAEHLRVRLKKEQEEKEHKKKEKAEAHLYTIIKVARDENLKEQIGKDIYFDLVDHEKVRSFRIQKQLLFTTFKEEVAKEYGIPVQFQRFWLWAKRQNHTYRPNRPLSPHEETQSVGQLREVSNKAHNAELKLFLEVELGPDLRPLPPPEKSKEDILLFFKLYNPEKEELCFVGRLFVKALGKPSEILTKLNEMAGFVPNEEIELYEARAKFMMLYLWDNLVYVTPLRRVLGEIKFEPNVMCEHIDKKATFRASQLEDGDIICFQKSPIPDSDTQMRYPDVPSYLEYVHNRQVVHFRLLEKPKDDDFSLELSKLHTYDDVVERVARQLGVDDPAKIRLTSHNCYSQQPKPQPIRYRGVEHLLDMLIHYNQTSDILYYEVLDIPLPELQGLKTLKVAFHHATKDEVVIHSIRLPKNSTIADVINDLKTKVELSSPSAELRLLEVFYHKIYKIFPLHEKIENINDQYWTLRAEEIPEEEKNLGPNDRLIHVYHFMKDPLQNQQIQNFGDPFYLAIREGETLAEVKERIQKKLQVPDEEFCKWKFAFISMNRPDYLQDSDVVSARFQRRDVYGAWEQYLGLEHADTAPKRAYTANQKKLTRITAAVSAALGSVIVIADEIFASTYILTILSKKLYLMSRIKFGVTRSIFFSRHYDLNKAPVHLTLQLPTSPMDNPTPSSSSGGGGAAAAANASSDEHRKTSPATAADFFDEEHTFDDILLPVDLFDFTHGLDAGDGCYVDDQAAIGQKPLSPAPEPAAEQQPSPAPEHGDDERLVMYYQGQEYIFDPVQPQKIENIFHHLNGQEMIPQSIRPQPTNLVRPITVPEDFDRFAALTRYREKKRNIKFIKKADYSARKEVALRMKRSKGKFAPRVQTSENSLAHRKGITFCTNCGESSDATPMMRHAPNGTKSFCNACGLMWANSRKIRKIRNPTSGEQEDQ

SEQ ID NO: 434 - protein, 1051 aa, Oryza sativa subsp. indica
  misc_feature: Public GI ID no.125536666
  misc_feature: Bit score of 939.0 for HMM based on sequences of FIGURE 10.
  misc_feature (52)..(172): Pfam Name: MATH Pfam Description: MATH domain
  misc_feature: Functional Homolog Of Ceres SEEDLINE ID no. ME03280 at SEQ ID NO. 389
MLVPHQELPAAAAAVVADAVQPMEVVAQTEPANAAESQPPEDPQTSRFTWTIENFTRINGKKHYSEPFVVGGFKWRVLIFPKGNNVDHFSMYLDVADSVNLPYGWNRYAQFSLAVVNQIHPKYTIRKDTQHQFNARESDWGFTSFMPLSDLYDPSRGYLVNDTVVVEAEVAVRRMVDYWTYDSKKETGYVGLKNQGATCYMNSLLQTLYHIPYFRKAVYHMPTTENDMPSGSIPLALQSLFYKLQYSDNSVATKELTKSFGWDTYDSFMQHDVQELNRVLCEKLEDKMKETVVEGTIEQLFEGHHINYIECINVDYKSNRKESFYDLQLDVKGCRDVYASFDKYVEVERLEGDNKYHAEQYGLQDAKKGVLFLDFPPVLQLQLKRFEYDYMRDTMVKINDRYEFPLQLDLDRDDGKYLAPDADRSIRNLYTLHRYKFDDERVTKEDTKKALEEQYGGEEELPQINPGFNNTPFKFTKYSNAYMLVYIRESDKDKIMCNVDEKDIAEHLRIRLKKEQEEKEHKKKEKAEAHLYTIIKVARDEDLKEQIGKNIYFDLVDHEKVRSFRIQKQLPFTSFKEEVAKECGIPVQFQRFWLWAKRQNHTYRPNRPLGPHEESQSVGQLREVSNKAHNAELKLFLEVETGVDLRPIRPPEKSKEDILLFFKLYNPEKEELCFVGRLFVKATGKPSEILTKLNEMAGFAPNEEIELYEEIKFEPNVMCEHIDKKLTFRSSQLEDGDIICFQKSPVLDGETQVRYPDVPSFLEYVHNRQVVHFRSLEKPKEDDFCLELSKLHTYDDVVERVARQLGLDDPSKIRLTSHNCYSQQPKPQPIRYRGVEHLLDMLVHYNQTSDILYYEVLDIPLPELQCLKTLKVAFHHATKDEVVIHSIRLPKNSTISDVITDLKTKVELSNPDAELRLLEVFYHKIYKIFPPHEKIENINDQYWTLRAEEIPEEEKNLGPHDRLIHVYHFMKDPNQNQQIQNFGDPFLLVIREGETAAEILERIQKKLRVPDEEFSKRRDVYGAWEQYLGLEHTDTTPKRSYTANQCCMCLD

SEQ ID NO: 435 - DNA, 3348 bp, Populus balsamifera subsp. trichocarpa
  misc_feature: Ceres ANNOT ID no.1528487
  misc_feature: Encodes the peptide sequence at SEQ ID NO. 436
atgactatgatgactccttcaccgttagaccaagaagacgaggagatgctcgtaccgcattcagatttagttgaaggtcctcagccaatggaagtagtggcacaagtggagcaaactagtaccgtggagaatcagcctgtggaggatcctccatcgatgaaatttacttggactattgagaattttactaggttgaacacgaagaagcattattctgatatatttattgttggcagttacaaatggagagtactgatattccctaaaggaaacaacgtggaccacctgtcgatgtatttggatgttgcagattcgacagctttgccatatggatggagtagatatgcgcaattcagtttggctgtggtcaatcaaattcataacaaatactcgattagaaaggacacacaacatcagttcaatgcaagagagagtgactggggctttacatctttcatgcctctgagtgaactttatgatcctagcagaggatacttagtgaatgatacagttgttattgaagctgaagttgctgtttgcaaggttttagattattggtcctatgactcaaagaaggagacgggctatgtaggactgaaaaaccaaggagcaacatgttacatgaactctctcctacagactctataccatatttcctacttccgaaaggcggtgtaccacatgccaacaactgagaatgacatgcctacaggaagcattccattggccctgcagagtttattctttaagcttcaatataatgataccagtgttgcaacaaaggaactgaccaaatcttttggctgggatacgtatgattccttcatgcaacatgacgtgcaagagcttaacagggtcctgtgtgagaagctagaggataaaatgaaggggactgttgtggagggcactatacagcagttgtttgagggtcaccatatgaactacattgagtgcatcaatgtggaatacaaatctacaagaaaggagtcattttatgatcttcagcttgatgtgaaaggttgtcgagatgtttatgcttcttttgacaaatatgtggaagttgaacgacttgagggtgataacaaatatcatgccgaagaacatggtttgcaggatgcaaagaagggtgtcttatttatcgacttcccgcctgttcttcaactccaattaaagcggtttgaatatgattttatgcgcgatactatggtgaagattaatgatcgctatgaatttcctcttcaacttgacctggacagggagaatgggaaatatttatcacctgaatctgacaggagtgtgcgaaatctatacacacttcacagtgttttggttcacagtggaggtgtgcatggtggacattattatgcttttatcaggcctaccctctctgatcaatggttcaaatttgatgatgaacgcgtgacaaaggaagatgtgaagagggccttagaagaacagtatggtggtgaggaagagctacctcagaccaatcctggctttaacaatactccatttaaattcacaaaatactcaaatgcatacatgcttgtgtatatacgggaaagtgacaaggacaagataatttgtaatgttgatgagaaagacattgctgaacacttgaggataaggctgaagaaagaacaagaagaaaaggaagacaagagaagatataaagcacaagctcacctttacacaattataaaggttgcgcgagatgaggaccttaaagagcaaattggaaaggatatttattttgaccttgtggatcatgacaaagtccgtaacttccgtattcagaaacagacgcagtttagtctgtttaaggaggaggttgctaaagagcttggtataccagtacaatttcagagattttggatatgggcaaagcgccaaaaccacacatatagacccaatcggccattgactccccaggaggaagcacaatcagttggacaactgagagaggtgtcaaataagacgcataatgctgaattaaagttgttcttggaagttgagcttgggctggatttacgtcccattgctccacctgaaaaaactaaagaagatattctgcttttcgtcaagctttatgaccctgaaaaacaagaattacgatatgttggtaggctttttgtgaagaattctagtaaaccgatagaaattctagcaaagcttaatcaaatggctggctttgcgtctgaggaagagattgaactttatgaggaaatcaagtttgagccttgtgtcatgtgtgaacaccttgataagagagcctcatttcgaacaagtcagattgaagatggggacataatatgctttcagaaatctcctcctgaaaatgaagaagactgtcgaaatccagatgtgccttcatatttggaatatgtgcacaatcggcagatagttcatttccgatctctagagaaggcaaaagaggatgatttttgtctagagttgtcaaaattacacacttatgatgatgttgtcgaaagagtagctcgccagattggtttggacgatccatccaaaatcaggttaacatcccacaactgctactctcagcagcctaagccacagccaattaaatatcgaggagtggagcatctatcagatatgttagttcactacaatcagacttccgatatcttgtattatgaagttctagatattcctcttccagagttgcaaggtctaaaaaatttgaaagttgctttccatcacgctaccaaagatgaagtggtaattcataacattagattgcctaaacaaagcaccgtgggggatgtaattaatgaacttaaaactaaggtagaattgtctcacccaaatgctgaacttcgactgcttgaagtattttatcacaagatttataagatctttccacccaatgaaaaaattgagaatataaatgaccagtattggacgctgcgggcagaggagattcccgaggaagaaaaaaatcttggtccccaagatcgcctgattcacgtttatcacttcacgaaagagtctggacagaatcaaatgcaagtacagaattttggtgaaccctttttcttggccatccatgaaggtgaaaccttagccgaagttaaaatgcgtatacaaaagaagctgcaggttcctgatgaggagtttgctaagtggaaatttgcatttctgtcactgggtcgtccagagtacttgcaggattctgatgttgtgttcacccgctttcagagaagagatgtatatggtgcttgggagcagtaccttgggttggagcactctgataatactcctaaaaggtcttatgcagtaaatcagaaccgtcacacatttgagaagcctgttaaaatatacaattag

SEQ ID NO: 436 - protein, 1112 aa, Populus balsamifera subsp. trichocarpa
  misc_feature: Ceres ANNOT ID no.1528487
  misc_feature: Bit score of 1100.1 for HMM based on sequences of FIGURE 10.
  misc_feature (56)..(176): Pfam Name: MATH Pfam Description: MATH domain
  misc_feature: Functional Homolog Of Ceres SEEDLINE ID no. ME03280 at SEQ ID NO. 389
MTPSPLDQEDEEMLVPHSDLVEGPQPMEVVAQVEQTSTVENQPVEDPPSMKFTWTIENFTRLNTKKHYSDIFIVGSYKWRVLIFPKGNNVDHLSMYLDVADSTALPYGWSRYAQFSLAVVNQIHNKYSIRKDTQHQFNARESDWGFTSFMPLSELYDPSRGYLVNDTVVIEAEVAVCKVLDYWSYDSKKETGYVGLKNQGATCYMNSLLQTLYHISYFRKAVYHMPTTENDMPTGSIPLALQSLFFKLQYNDTSVATKELTKSFGWDTYDSFMQHDVQELNRVLCEKLEDKMKGTVVEGTIQQLFEGHHMNYIECINVEYKSTRKESFYDLQLDVKGCRDVYASFDKYVEVERLEGDNKYHAEEHGLQDAKKGVLFIDFPPVLQLQLKRFEYDFMRDTMVKINDRYEFPLQLDLDRENGKYLSPESDRSVRNLYTLHSVLVHSGGVHGGHYYAFIRPTLSDQWFKFDDERVTKEDVKRALEEQYGGEEELPQTNPGFNNTPFKFTKYSNAYMLVYIRESDKDKIICNVDEKDIAEHLRIRLKKEQEEKEDKRRYKAQAHLYTIIKVARDEDLKEQIGKDIYFDLVDHDKVRNFRIQKQTQFSLFKEEVAKELGIPVQFQRFWIWAKRQNHTYRPNRPLTPQEEAQSVGQLREVSNKTHNAELKLFLEVELGLDLRPIAPPEKTKEDILLFVKLYDPEKQELRYVGRLFVKNSSKPIEILAKLNQMAGFASEEEIELYEEIKFEPCVMCEHLDKRASFRTSQIEDGDIICFQKSPPENEEDCRNPDVPSYLEYVHNRQIVHFRSLEKAKEDDFCLELSKLHTYDDVVERVARQIGLDDPSKIRLTSHNCYSQQPKPQPIKYRGVEHLSDMLVHYNQTSDILYYEVLDIPLPELQGLKNLKVAFHHATKDEVVIHNIRLPKQSTVGDVINELKTKVELSHPNAELRLLEVFYHKIYKIFPPNEKIENINDQYWTLRAEEIPEEEKNLGPQDRLIHVYHFTKESGQNQMQVQNFGEPFFLAIHEGETLAEVKMRIQKKLQVPDEEFAKWKFAFLSLGRPEYLQDSDVVFTRFQRRDVYGAWEQYLGLEHSDNTPKRSYAVNQNRHTFEKPVKIYN

SEQ ID NO: 437 - protein, 1125 aa, Oryza sativa subsp. japonica
  misc_feature: Public GI ID no.108862691
  misc_feature: Bit score of 1076.3 for HMM based on sequences of FIGURE 10.
  misc_feature (69)..(189): Pfam Name: MATH Pfam Description: MATH domain
  misc_feature: Functional Homolog Of Ceres SEEDLINE ID no. ME03280 at SEQ ID NO. 389
MTMMTPPPIEQQQQEDEEMLVPHQELPAAAAVVADAVQPMEVVAQTEPANAAESQPPEDPQTSRFTWTIENFTRINGKKHYSEPFVVGGFKWRVLIFPKGNNVDHFSMYLDVADSVNLPYGWNRYAQFSLAVVNQIHPKYTIRKDTQHQFNARESDWGFTSFMPLSDLYDPSRGYLVNDTVVVEAEVAVRRMVDYWTYDSKKETGYVGLKNQGATCYMNSLLQTLYHIPYFRKAVYHMPTTENDMPSGSIPLALQSLFYKLQYSDNSVATKELTKSFGWDTYDSFMQHDVQELNRVLCEKLEDKMKETVVEGTIEQLFEGHHINYIECINVDYKSNRKESFYDLQLDVKGCSDVYASFDKYVEVERLEGDNKYHAEQYGLQDAKKGVLFLDFPPVLQLQLKRFEYDYMRDTMVKINDRYEFPLQLDLDRDDGKYLAPDADRSIRNLYTLHSVLVHSGGVHGGHYYAFIRPTLSDQWYKFDDERVTKEDTKKALEEQYGGEEELPQINPGFNNTPFKFTKYSNAYMLVYIRESDKDKIMCNVDEKDIAEHLRIRLKKEQEEKEHKKKEKAEAHLYTIIKVARDEDLKEQIGKNIYFDLVDHEKVRSFRIQKQLPFTSFKEEVAKECGIPVQFQRFWLWAKRQNHTYRPNRPLGPHEESQSVGQLREVSNKAHNAELKLFLEVETGVDLRPIRPPEKSKEDILLFFKLYNPEKEELCFVGRLFVKATGKPSEILTKLNEMAGFAPNEEIELYEEIKFEPNVMCEHIDKKLTFRSSQLEDGDIICFQKSPVSDGETQVRYPDVPSFLEYVHNRQVVHFRSLEKPKEDDFCLELSKLHTYDDVVERVARQLGLDDPSKIRLTSHNCYSQQPKPQPIRYRGVEHLLDMLVHYNQTSDILYYEVLDIPLPELQCLKTLKVAFHHATKDEVVIHSIRLPKNSTISDVITDLKTKVELSNPDAELRLLEVFYHKIYKIFPPHEKIENINDQYWTLRAEEIPEEEKNLGPHDRLIHVYHFMKDPNQNQQIQNFGDPFLLVIREGETAAEILERIQKKLRVPDEEFSKWKLAFISMNRPEYLQDVDVVSARFQRRDVYGAWEQYLGLEHTDTTPKRSYTANQNRHTFEKPVKIYN

SEQ ID NO: 438 - protein, 1108 aa, Oryza sativa subsp. japonica
  misc_feature: Public GI ID no.14209584
  misc_feature: Bit score of 919.3 for HMM based on sequences of FIGURE 10.
  misc_feature (57)..(175): Pfam Name: MATH Pfam Description: MATH domain
  misc_feature: Functional Homolog Of Ceres SEEDLINE ID no. ME03280 at SEQ ID NO. 389
MVTPRAPELLQQDQDEEMLVPDQDVVVEGPQPMEDSGSTVENEQVPETSTSRFTWTIEDFSNHRKLYSDVFVVGGHKWRVLVFPTGNSVQSLSMYLDIADANEQPHGWSKYAQFSLAVINQLDSKYSLRKEAAHHFSTRESDWGFTSFMHLGDLYDPTKGYIVNDKCIIEAEVAVRKIVDFWNYDSKKETGYVGLKNQGATCYMNSLLQTLYHIPYFRKAVYHMPTTENDTPCGSIPLALQSLFCKLQHSDNSVSTKELTKSFGWDTVDSFLQHDVQELNRVLCEKLENKMKGTTVEGTIQQLFEGHHMNYIECINVDYKSTRKESFYDLALDVKGCSDVYASFDKYVEVERLEGDNKYQSEKHGLQDAKKGMLFIDFPPVLQVQLKRFEYDFVRDTMVKINDRYEFPLQLDLDKDDGKYLSPEADRRVRNLYTLHSVLVHSGGGHGGHYYAFIRPALSDIWYKFDDERVTKEDMKRALEEQYGGEEELPHTNPGLNTTPLRFTKHSNAYMLVYIRESDREKIICNLDENDIPEHLKIRLRKENEEREYKKKEKAEAHMFTALKVARDSDFAEQIGKHIYFDLVDYDNIQSLRAPKHLTINQAKVDLSKEFGIPVQSQRFWLWAKRQNHTFRPVRPLTLQEEASSIGHLTDPSNKSLNSELKLFLEVALGQENHPISVPPKTKDDILIFFKLYDPEKEELRYVGKLLVKASGKPADIVQKLQEMAGFQSDEDIELYEEVMFEPSVMCEPININDSFLSSQLEDGDIICYQKRCSPEKLDHYRCADVPSFFEYIQNRQVVHFRLLENPKDDDFTLELSKRFTYDDVVEKVANQLGLDDPSKLRLTQHLPYSQMPKSHYIKYRGLDHLSDMLRNGNQMSDILYYEILDIPLPVLQDLITLRVAFYHATNNEVSSHFIRLPKGSTMSDLIEDMKSKVELSYSDAEFRLFEVYKNKIRKVYQPSEKISVNEFNGLLCVEEVPEEEKNAGVRDRLVHVCHFIIEKQHIDYYGEPFFFLIRDGETLSDIKVRIQKKLLVSDEQFAKWKFAYIAHNRLAGEYFQDSDIVLSRFQKDVYGPWEQCLGLEHSDVTPKRSCLSNQNRNSFDKAVKIFN

SEQ ID NO: 439 - DNA, 1913 bp, Arabidopsis thaliana
  misc_feature: Ceres SEEDLINE ID no.ME06336
  misc_feature: Encodes the peptide sequence at SEQ ID NO. 441
aaagagagaagggagaggcgagggagctcaccaggagagaggggcctgtgcgtgagcattgagcaaagcaaaggaagcagtacatacatacatatttctctcgctcgctcgcagaraggcccggccggccggctccatgcaacaagggaggacgacgagcggtggcggtgggcgatgatgatgatgatgatggcgggggagcacgtgctggccgctctgggcaccctactgctggcctcgctcctgaccctggtgctgaaccacttcctgcccttgcttctgaaccccaaggcccccaggggaagcttcgggtggccgctcctcggcgagacgctcaggttcctcacgccgcacgcctccaacacgctgggcggcttcctcgaggatcactgctccaggtatgggcgggtgttcaagtcccacctgttctgcaccccgacggtggtgtcctgcgaccaggacctcaaccacttcatcctgcagaacgaggagcggctgttccagtgcagctacccgaggccgatccatggcatcctgggcaagtcctccatgctcgtcgtcctgggcgaggaccacaagcgcctcaggaacctggccctcgccctcgtcacctccaccaagctcaagcccagctacctaggcgacatcgagaagatcgcgctgcacgtcgtcggcgcatggcgacggcacggcagcagcggcggcgtcagggtcgtcgcattctgcgaggaggcaagaaagttcgcattcagtgtgatagtgaagcaggtgctggggctgtcgccagaggagccggtcactgcaaggatactggaggacttcctggccttcatgaagggactcatctccttccccctctacatcccagggaccccatatgccaaggctgtccgggcgagagagaggatatccagcactgtgaagggcatcatcaaggagcggaggagcgctgggtcatggaacaagcagggcgacttccttgacgtgctgctgtcaagcaacgagctatctgacgaggagaaagtgagctttgtgctggactccctgctgggagggtatgagaccacctcgctcctcatctccatggtcgtttatttccttggccagtctgctcaagatctggacctggttaagagggagcacgacagcataagatccaacaaaggcaaggaggagtgcttgacttcagaagactacaagaagatggaatatacccaacaagtcatcaacgaggcgctgagatgcggcaacatcgtcaagttcgtccaccggaaggcgctgaaagacgtcaaatacaaagagtatctgattccatctggctggaaggtcctaccggtcttcactgccgttcatctgaacccctcacttcatggagacgcgcagcagtttcagccctgtaggtgggagggcacaagccaagggacaagcaagaggtttacaccgttcggtggtggcccccggctctgcccaggatcagagctcgctaaagtggagactgctttcttcctccatcaccttgtcctcaattatagatggagaattgatggcgatgacattccaatggcatacccgtatgtggagtttcagagaggtctgccaatagaaatcgagccaacgtcccctgaatcttgactgtcctggagctacagccatcagttatcacaccagagagaaaaggggaaggtgcatggagtatacatgaatggtcagtgacagatctcacaagtgaaggaacactgagggcgcgtgctagtagctagcatatgaggcagctgagactgtaatttaatgtacatggtgtagatatattttgtccatggcaattgcttgaagtggctgattcacttcaccctgtaaaacattctccagtggtttcaactgctatcctataaaaaagaagggcccctgtgttt

SEQ ID NO: 440 - DNA, 1932 bp, Arabidopsis thaliana
  misc_feature: Ceres SEEDLINE ID no.ME06336
  misc_feature: Inplanta Sequence
  misc_feature: Encodes the peptide sequence at SEQ ID NO. 441
aaagagagaagggagaggcgagggagctcaccaggagagaggggcctgtgcgtgagcattgagcaaagcaaaggaagcagtacatacatacatatttctctcgctcgctcgcagagaggcccggccggccggctccatgcaacaagggaggacgacgagcggtggcggtgggcgatgatgatgatgatgatggcgggggagcacgtgctggccgctctgggcaccctactgctggcctcgctcctgaccctggtgctgaaccacttcctgcccttgcttctgaaccccaaggcccccaggggaagcttcgggtggccgctcctcggcgagacgctcaggttcctcacgccgcacgcctccaacacgctgggcggcttcctcgaggatcactgctccaggtatgggcgggtgttcaagtcccacctgttctgcaccccgacggtggtgtcctgcgaccaggacctcaaccacttcatcctgcagaacgaggagcggctgttccagtgcagctacccgaggccgatccatggcatcctgggcaagtcctccatgctcgtcgtcctgggcgaggaccacaagcgcctcaggaacctggccctcgccctcgtcacctccaccaagctcaagcccagctacctaggcgacatcgagaagatcgcgctgcacgtcgtcggcgcatggcgacggcacggcagcagcggcggcgtcagggtcgtcgcattctgcgaggaggcaagaaagttcgcattcagtgtgatagtgaagcaggtgctggggctgtcgccagaggagccggtcactgcaaggatactggaggacttcctggccttcatgaagggactcatctccttccccctctacatcccagggaccccatatgccaaggctgtccgggcgagagagaggatatccagcactgtgaagggcatcatcaaggagcggaggagcgctgggtcatggaacaagcagggcgacttccttgacgtgctgctgtcaagcaacgagctatctgacgaggagaaagtgagctttgtgctggactccctgctgggagggtatgagaccacctcgctcctcatctccatggtcgtttatttccttggccagtctgctcaagatctggacctggttaagagggagcacgacagcataagatccaacaaaggcaaggaggagtgcttgacttcagaagactacaagaagatggaatatacccaacaagtcatcaacgaggcgctgagatgcggcaacatcgtcaagttcgtccaccggaaggcgctgaaagacgtcaaatacaaagagtatctgattccatctggctggaaggtcctaccggtcttcactgccgttcatctgaacccctcacttcatggagacgcgcagcagtttcagccctgtaggtgggagggcacaagccaagggacaagcaagaggtttacaccgttcggtggtggcccccggctctgcccaggatcagagctcgctaaagtggagactgctttcttcctccatcaccttgtcctcaattatagatggagaattgatggcgatgacattccaatggcatacccgtatgtggagtttcagagaggtctgccaatagaaatcgagccaacgtcccctgaatcttgactgtcctggagctacagccatcagttatcacaccagagagaaaaggggaaggtgcatggagtatacatgaatggtcagtgacagatctcacaagtgaaggaacactgagggcgcgtgctagtagctagcatatgaggcagctgagactgtaatttaatgtacatggtgtagatatattttgtccatggcaattgcttgaagtggctgattcacttcaccctgtaaaacattctccagtggtttcaactgctatcctataaaaaagaagggcccctgtgtttaataaaaaaaaaaaaaaaa

SEQ ID NO: 441 - protein, 485 aa, Arabidopsis thaliana
  misc_feature: Ceres SEEDLINE ID no.ME06336
  misc_feature: Bit score of 1231.9 for HMM based on sequences of FIGURE 7.
  misc_feature (228)..(466): Pfam Name: p450 Pfam Description: Cytochrome P450
MMMMMMAGEHVLAALGTLLLASLLTLVLNHFLPLLLNPKAPRGSFGWPLLGETLRFLTPHASNTLGGFLEDHCSRYGRVFKSHLFCTPTVVSCDQDLNHFILQNEERLFQCSYPRPIHGILGKSSMLVVLGEDHKRLRNLALALVTSTKLKPSYLGDIEKIALHVVGAWRRHGSSGGVRVVAFCEEARKFAFSVIVKQVLGLSPEEPVTARILEDFLAFMKGLISFPLYIPGTPYAKAVRARERISSTVKGIIKERRSAGSWNKQGDFLDVLLSSNELSDEEKVSFVLDSLLGGYETTSLLISMVVYFLGQSAQDLDLVKREHDSIRSNKGKEECLTSEDYKKMEYTQQVINEALRCGNIVKFVHRKALKDVKYKEYLIPSGWKVLPVFTAVHLNPSLHGDAQQFQPCRWEGTSQGTSKRFTPFGGGPRLCPGSELAKVETAFFLHHLVLNYRWRIDGDDIPMAYPYVEFQRGLPIEIEPTSPES

SEQ ID NO: 442 - protein, 471 aa, Oryza sativa subsp. indica
  misc_feature: Public GI ID no.114329476
  misc_feature: Bit score of 310.8 for HMM based on sequences of FIGURE 7.
  misc_feature (40)..(432): Pfam Name: p450 Pfam Description: Cytochrome P450
  misc_feature: Functional Homolog Of Ceres SEEDLINE ID no. ME06336 at SEQ ID NO. 441
MGAFLLFVCVLAPFLLVCAVRGRRRQAGSSEAAACGLPLPPGSMGWPYVGETFQLYSSKNPNVFFNKKRNKYGPIFKTHILGCPCVMVSSPEAARFVLVTQAHLFKPTFPASKERMLGPQAIFFQQGDYHAHLRRIVSRAFSPESIRASVPAIEAIALRSLHSWDGQFVNTFQEMKTYALNVALLSIFGEEEMRYIEELKQCYLTLEKGYNSMPVNLPGTLFHKAMKARKRLGAIVAHIISARRERQRGNDLLGSFVDGREALTDAQIADNVIGVIFAARDTTASVLTWMVKFLGDHPAVLKAVTEEQLQIAKEKEASGEPLSWADTRRMKMTSRVIQETMRVASILSFTFREAVEDVEYQGYLIPKGWKVLPLFRNIHHNPDHFPCPEKFDPSRFEVAPKPNTFMPFGNGTHSCPGNELAKLEMLVLFHHLATKYRWSTSKSESGVQFGPFALPLNGLPMSFTRKNTEQE

SEQ ID NO: 443 - DNA, 1154 bp, Gossypium hirsutum
  misc_feature: Ceres CLONE ID no.1849135
  misc_feature: Encodes the peptide sequence at SEQ ID NO. 444
tgagttaacagtgaagcaactaatgagctatgaccctggtgaatggagtgaaagtttaagaaaagaataccttctagttattgaaggattcttcaccgttccgcttccacttttttcaaccacttatcgtcgagccatcaaagctcggaccaaggtggcggaggcattgagtttaatagtgagggaaaggaggaaagagtatgaaagaggggcgaaaaagaatgatatgttggcagcattgttggcaggggatgataaattttcagatgaacaaatagtggattttttggtagcattgcttgttgctggttacgaaacaacttcaactattatgactcttgctgtcaagttcttgactgagacacctcttgctttggctcaactcaaggaagaacacgaagggattagggcgaaaaaatccgaatccgaggctttacaatggagtgattataagtcaatgccattcactcaatgtgttgttaacgagacgttacgagttgcaaacataatcagcggagttttccgacgagcaatgacggatatcaacataaaaggttacacaattccgaaaggttggagggttttcgcatcattccgagccgtacatctcgaccacaatcagttcaaagatgctcgcacgttcaatccgtggagatggcagagtaactccggaataagctgccccagacacgttttcacaccatttggaggagggcctcgattgtgcccaggatacgagcttgctagagtagaactctcggtattcttacaccacctagtgacccggtttagttgggaaccggccgaagaagataagctcgtcttctttccaacgacgcgaacgcaaaaacggtatccgatcaatgtgcggcgtcgaaacggatcgttttcttagccaaatgtactgttaaaaacataaatgttagagaaggagaggtgtaatagaattttggatggtgtgagatgcaataattaaaattagggggaaaaaaaaggaaaaatagagttagtgaatgtaaattaatttgattcttattatgtgttgggcattatatatatatattttatccatattcaagttgtaacaatgcctaatggtagaatccatccatttccattaaaatgaaaagaacaatatatataagtttttatgc

SEQ ID NO: 444 - protein, 290 aa, Gossypium hirsutum
  misc_feature: Ceres CLONE ID no.1849135
  misc_feature: Bit score of 325.1 for HMM based on sequences of FIGURE 7.
  misc_feature (28)..(282): Pfam Name: p450 Pfam Description: Cytochrome P450
  misc_feature: Functional Homolog Of Ceres SEEDLINE ID no. ME06336 at SEQ ID NO. 441
MSYDPGEWSESLRKEYLLVIEGFFTVPLPLFSTTYRRAIKARTKVAEALSLIVRERRKEYERGAKKNDMLAALLAGDDKFSDEQIVDFLVALLVAGYETTSTIMTLAVKFLTETPLALAQLKEEHEGIRAKKSESEALQWSDYKSMPFTQCVVNETLRVANIISGVFRRAMTDINIKGYTIPKGWRVFASFRAVHLDHNQFKDARTFNPWRWQSNSGISCPRHVFTPFGGGPRLCPGYELARVELSVFLHHLVTRFSWEPAEEDKLVFFPTTRTQKRYPINVRRRNGSFS

SEQ ID NO: 445 - protein, 438 aa, Oryza sativa subsp. indica
  misc_feature: Public GI ID no.125534105
  misc_feature: Bit score of 209.7 for HMM based on sequences of FIGURE 7.
  misc_feature (240)..(436): Pfam Name: p450 Pfam Description: Cytochrome P450
  misc_feature: Functional Homolog Of Ceres SEEDLINE ID no. ME06336 at SEQ ID NO. 441
MGFPIVGETFQFFRTSPSIDMPIYYKRRLERYGPIFKTNIGGQHVVISLDPEVNQFIFQQEGKLFQSWFPETTLNIFGKKTLTTYNRTAHKLIRSFVCKLYGPENVKKSLLPELENSMRESLASWIGKPSVEVNDGVSNMIFGLAAKHLIGLDITNSGELKKNFQEIFQVMVSIPFPIYFPGTSFYRCMQGRRNVWTTLTNVMKKRLSAPGNKFGDLVDLIVEELRSENPTIDESFAIDTLSGLLFASFAPLSCTLTTTFKFLNDNPEVFDKLKEEHEMILKKREGANSGFTWEEYKSLKFSTQVVNEINRITTVIPGGFRKALTDVEVNGYTIPSGWLVMISPMGVHLNPKLFEDPLKFDPWRWTEEKRISMQRNFMPFGGGIRMCPAVEFNKLFITLFLHIVVTEYRWKDIDGGNVKRISEVLVAQEYHIQLVPQT

SEQ ID NO: 446 - protein, 469 aa, Solanum tuberosum
  misc_feature: Public GI ID no.76803519
  misc_feature: Bit score of 316.7 for HMM based on sequences of FIGURE 7.
  misc_feature (37)..(462): Pfam Name: p450 Pfam Description: Cytochrome P450
  misc_feature: Functional Homolog Of Ceres SEEDLINE ID no. ME06336 at SEQ ID NO. 441
MEFVSMLCLFTFISFTLLLIHSIFKFLAFASKKLPLPPGTLGLPYIGETLQLYSQNPNVFFASKVKKYGSIFKTYILGCPCVMISSPEAAKQVLVTRANLFKPTFPASKERMLGKQAIFFHQGDYHAKLRKLVLQAFKPDSIRNIIPDIESIAITSLESFEGRLINTYQEMKTYTFNVALISIFGKDEFLYREELKKCYYILEKGYNSMPINLPGTLFNKAMKARKELAKIVAKIISTRREMKIDHSDLLGSFMGDKEGLTDEQIADNVIGVIFAARDTTASVLTWILKYLGENPSVLQAVTEEQENIMRTKEVNDEEKVLNWQDTRQMPMTTRVIQETLRVASILSFTFREAVEDVEFEGYLIPKGWKVLPLFRNIHHSPDNFPEPEKFDPSRFEVSPKPNTFMPFGNGVHSCPGNELAKLEILILVHHLTTKYRWSMVGPQNGIQYGPFALPQNGLPIKLSLKTSST

SEQ ID NO: 447 - protein, 448 aa, Oryza sativa subsp. indica
  misc_feature: Public GI ID no.125549394
  misc_feature: Bit score of 262.9 for HMM based on sequences of FIGURE 7.
  misc_feature (288)..(409): Pfam Name: p450 Pfam Description: Cytochrome P450
  misc_feature: Functional Homolog Of Ceres SEEDLINE ID no. ME06336 at SEQ ID NO. 441
MEKSELLLGSYSYAALCGVTLIIGWLAHWIYKWMNPPCIGRLPPGSMGFPIIGETFQFFRASPSIDMPSYYKQRLERYGPLFKTSLVGRPVIISLDPEVNRFIFQQEGKLFQSWYPETAINIFGKKSLTTYNGTIHKFIRGVAAKLFGLENLKESLLPELENSMRESFASWTGKPSVEVQDGVSDMIFDLVAKKLIGLDVTNSRELRKNFQDFFQGMVSFPIYFPGTSFYRSMQGRRNVRNTLTDIMKERLSAPGKKYGDLVDLIVEELQSEKPMIDENFAIDALAALLFTSFATLSSTLTVAFKYLTDNPKVVEELKEEHGTILKKREGVNSGFTWEEYRSLKFSTQVMNEITRISNVTPGVFRKTLTDVQVKGYTIPSGWLVMISPMAVHLNPKLFEDPLKFDPWRWRTVSKSIIGTKGGKSKASEARAPPLSSIRTLCNYAALGY

SEQ ID NO: 448 - DNA, 1621 bp, Panicum virgatum
  misc_feature: Ceres CLONE ID no.1992165
  misc_feature: Encodes the peptide sequence at SEQ ID NO. 449
ggcactcctcagttgagttaccatataccagacgctagcgaagtagcgatggatatgggcgatccctcccttgtggtggcggccgtcgccgtggccttatcccttgtgttccttgtcgtagcggcgagggccagcaggaagccaggcaagctgccgctgccccccgggtcgatgggcctgccggtgatcgggcagagcctgggcttcctccgcgcgctgcgctccaacacagcagagcagtggattcaggagcgcgtggagcggtacgggccggtgtccaagctgaggctcttcggcacccgcacggtgatgctcaccgggcccgcggccaacaagttcgtcttcaccagcgcgtcgctggggacggagcagccccagtcgacgcggcggatagtcggggagaggcagatcctggagctcatgggcgccgaccacaagcgcgtccgcggcgcgctgctcgagttcctcaagccggacatgctgcggctatacgtgggcaagatcgacggcgaggtgcggcgccacctcgacgagtactgggccggccgggccaccgtcacggtgatgccgctgatgaagaggctcacgttcgacatcatctccctgctgctcttcggcctggagcgaggcgccgtccgggaagccctcttcgacgacttcgagcacgtcttggatggcgtgtggtccgtccccctggacctacccttcacggcgtaccgccggagcctcagggccagcgccagtgctcgccgggtgatcgccgggatcacgcgggagaccaaggccaagctggagcggggcgaggcctcccggagcagcgacctcgtcgcgtgcctgctcagcttgaccgccggcagcggcgcgcggctgctgagcgatcaggaggtcgtggacaacgccatggcctccatgatcgccggccacgacacgtcctccatccttctcgccttcctcatccgccagctcgccgacgatcctgacacgctctccgccatggtccacgagcacgagcagatcgccaagagcaagggcgacggcgacaccctgacctgggaggacctgtctaacatgaagttcacgtggcgcgccgcgcaggagatgctccggctggtgcccccgatcttcggcaccttcaggacagcgctcaaagacatcgagttcaacggctacctcatccccaaagggtggaaggtgctctggacggcgcccgccacgcacatggacgggagcatctaccccgagccggccaaattcaacccgtcccgcttcgagaacccgacggcgccgccttgctccttcgtcgccttcggcggcggcccgaggatctgcgtcggcatggagttcgccaggatcgagacgctggtggccatgcattacctggtgaggcgcttcagctggaagctctgctgcaaggagaacaccttcgtcaggaacatccagccgtggccgctgcacggcctgcccgtacaacttgagcaaaaggcagcaaaatcgccatgattcatcacatcatatacgatcgaccgtgacgatacaataatatactccaacttcaaagatacctagcgatgttgattcgtcaccacagatccaaatgaataaatttatatcttgtctcctc

SEQ ID NO: 449 - protein, 481 aa, Panicum virgatum
  misc_feature: Ceres CLONE ID no.1992165
  misc_feature: Bit score of 271.0 for HMM based on sequences of FIGURE 7.
  misc_feature (164)..(451): Pfam Name: p450 Pfam Description: Cytochrome P450
  misc_feature: Functional Homolog Of Ceres SEEDLINE ID no. ME06336 at SEQ ID NO. 441
MGDPSLVVAAVAVALSLVFLVVAARASRKPGKLPLPPGSMGLPVIGQSLGFLRALRSNTAEQWIQERVERYGPVSKLRLFGTRTVMLTGPAANKFVFTSASLGTEQPQSTRRIVGERQILELMGADHKRVRGALLEFLKPDMLRLYVGKIDGEVRRHLDEYWAGRATVTVMPLMKRLTFDIISLLLFGLERGAVREALFDDFEHVLDGVWSVPLDLPFTAYRRSLRASASARRVIAGITRETKAKLERGEASRSSDLVACLLSLTAGSGARLLSDQEVVDNAMASMIAGHDTSSILLAFLIRQLADDPDTLSAMVHEHEQIAKSKGDGDTLTWEDLSNMKFTWRAAQEMLRLVPPIFGTFRTALKDIEFNGYLIPKGWKVLWTAPATHMDGSIYPEPAKFNPSRFENPTAPPCSFVAFGGGPRICVGMEFARIETLVAMHYLVRRFSWKLCCKENTFVRNIQPWPLHGLPVQLEQKAAKSP

SEQ ID NO: 450 - protein, 475 aa, Oryza sativa subsp. indica
  misc_feature: Public GI ID no.125558545
  misc_feature: Bit score of 245.7 for HMM based on sequences of FIGURE 7.
  misc_feature (129)..(466): Pfam Name: p450 Pfam Description: Cytochrome P450
  misc_feature: Functional Homolog Of Ceres SEEDLINE ID no. ME06336 at SEQ ID NO. 441
MDSSILPALLIALFIPILLHLVTRFKYSSYNLPPGSLGFPFVGQSISFLRALRSNTDHQWYQGRIGKYGPVSKMWLFGSPAVLMAGPAANRFIFSNKDLLFTGTRSINLLSGRNILMLSGEELKQVSPEMVIRYVSKMDEEVRRHVKVNWVGHKTVKVLPLAKRLTLDIICSVIFGQEAGSVREALATDFPAMVRAALSIPVKIPFTRFSRGLSASQRIRELLRGIARERETLLQQQQAHGASAADDFFTYMLALRAEGAHSLTVEDIVDNAIFLLIAGYETTSVLITFMLWHLDKEPEVLSKITEEQDEIARNKGPEDALTWDDVSRMKYTWKVAMETLRTIPPIFGSFRTATRDIEYQGYHIPKGWMVFTAQSVTHLDANIFPEPSNFDPARFENNSSIPPYCFVPFGGGPRMCPGNEFARTETLVTMHYLVTQFRWKLCCKEESYKKDPSPTPLLGLPVELEPRCLPENAHA

SEQ ID NO: 451 - protein, 476 aa, Stevia rebaudiana
  misc_feature: Public GI ID no.89242710
  misc_feature: Bit score of 271.1 for HMM based on sequences of FIGURE 7.
  misc_feature (234)..(448): Pfam Name: p450 Pfam Description: Cytochrome P450
  misc_feature: Functional Homolog Of Ceres SEEDLINE ID no. ME06336 at SEQ ID NO. 441
MIQVLTPILLFLIFFVFWKVYKHQKTKINLPPGSFGWPFLGETLALLRAGWDSEPERFVRERIKKHGSPLVFKTSLFGDRFAVLCGPAGNKFLFCNENKLVASWWPVPVRKLFGKSLLTIRGDEAKWMRKMLLSYLGPDAFATHYAVTMDVVTRRHIDVHWRGKEEVNVFQTVKLYAFELACRLFMNLDDPNHIAKLGSLFNIFLKGIIELPIDVPGTRFYSSKKAAAAIRIELKKLIKARKLELKEGKASSSQDLLSHLLTSPDENGMFLTEEEIVDNILLLLFAGHDTSALSITLLMKTLGEHSDVYDKVLKEQLEISKTKEAWESLKWEDIQKMKYSWSVICEVMRLNPPVIGTYREALVDIDYAGYTIPKGWKLHWSAVSTQRDEANFEDVTRFDPSRFEGAGPTPFTFVPFGGGPRMCLGKEFARLEVLAFLHNIVTNFKWDLLIPDEKIEYDPMATPAKGLPIRLHPHQV

SEQ ID NO: 452 - protein, 480 aa, Artemisia annua
  misc_feature: Public GI ID no.86279654
  misc_feature: Bit score of 269.7 for HMM based on sequences of FIGURE 7.
  misc_feature (225)..(452): Pfam Name: p450 Pfam Description: Cytochrome P450
  misc_feature: Functional Homolog Of Ceres SEEDLINE ID no. ME06336 at SEQ ID NO. 441
MPMTVMLLFVFLLFIAICFFLVHRHNSTTTKNLPPGSFGWPFIGETLAYIRSKRGGDPERFTKERIEKYGSTLVFKTSVAGERMAVFCGPEGNKFLFGNENKLVASWWPNSVRILFEKCLITIRGDEAKWLRKMMFAYLGPDALSNRYTGTMEVVTRLHIQNHWQGKSELKVFETVRPYLFELACRLFLSLDDPKHVAELGTLFNTFLKGLTELPINIPGTRFYRAKRAANAIKKQLIVIIKQRRQALKQEDQSSSFEDLLSHLLVSSDENGRFLSEAEIANNVLLLLFAGHDTSAVSITLLMKSLAEHPQVYDNVLKEQLGILEAKAPGEMLNWEDIQKMRYSWYVVCEVMRLIPPVVGSFREALVDFEYAGYTIPKGWKIIWSAVMTHKEENNFPNATKFDPSRFEGAGPTPFTYVPFGGGPRMCLGKELARVRILVFLHNIMTKFKWDLLIPDEKIGYDPLATPVKGLPVRLHPHQV

SEQ ID NO: 453 - protein, 485 aa, Taxus cuspidata
  misc_feature: Public GI ID no.28380196
  misc_feature: Bit score of 279.7 for HMM based on sequences of FIGURE 7.
  misc_feature (226)..(453): Pfam Name: p450 Pfam Description: Cytochrome P450
  misc_feature: Functional Homolog Of Ceres SEEDLINE ID no. ME06336 at SEQ ID NO. 441
MDALKQLEVSPSILFVTLAVMAGIILFFRSKRHSSVKLPPGNLGFPLVGETLQFVRSLGSSTPQQFIEERMSKFGDVFKTSIIGHPTVVLCGPAGNRLVLSNENKLVQMSWPSSMMKLIGEDCLGGKTGEQHRIVRAALTRFLGPQALQNHFAKMSSGIQRHINEKWKGKDEATVLPLVKDLVFSVASRLFFGITEEHLQEQLHNLLEVILVGSFSVPLNIPGFSYHKAIQARATLADIMTHLIEKRRNELRAGTASENQDLLSVLLTFTDERGNSLADKEILDNFSMLLHGSYDSTNSPLTMLIKVLASHPESYEKVAQEQFGILSTKMEGEEIAWKDLKEMKYSWQVVQETLRMYPPIFGTFRKAITDIHYNGYTIPKGWKLLWTTYSTQTKEEYFKDADQFKPSRFEEEGKHVTPYTYLPFGGGMRVCPGWEFAKMETLLFLHHFVKAFSGLKAIDPNEKLSGKPLPPLPVNGLPIKLYSRS

SEQ ID NO: 454 - protein, 498 aa, Oryza sativa subsp. indica
  misc_feature: Public GI ID no.125558388
  misc_feature: Bit score of 266.2 for HMM based on sequences of FIGURE 7.
  misc_feature (39)..(489): Pfam Name: p450 Pfam Description: Cytochrome P450
  misc_feature: Functional Homolog Of Ceres SEEDLINE ID no. ME06336 at SEQ ID NO. 441
MAVVAVAVVIALLAAFLTPLAVYLARRASPPPPPRRNLPPGSLGLPLIGQSLSLLRAMRRNTADRWLQDRIDRYGPVSKLSLFGAPTVLVAGPAANKVVFHHEALAPKQPRSLAAIIGRRNILELVGDDHRRVRGAILQFLRPDMVRRYVGKIDSEVRRHLAARWAGRRTVAVFPLMKTLAFDVIATLLFGLDRGAIREQLADAFDGMHEGLWTVPVDLPFTPFRRGLMASARARRLVEATVREKAAKLEHGESSPSDDLISCLLSLRDGGRQLLTEEEIVDNSVLALVAGHDTSAVLLTFMLRHLANDPATLAAMAQGKNPTLPSPDEHSEHEEIARGKRDGEALTWEDVAKMKLSWRVAQETLRMVPPVLGSFRRAPVDVEFEGYTIPRGWQIFWSPSVTHMDPAIFHEPTKFEPSRFDGTAAAAAYSFVPFGGGPRICPGMELARVETLVTAHYLVRHFRWKLCLGEEKNTFLRDPMPTPHDGLPVELDHIAPLC

SEQ ID NO: 455 - DNA, 2319 bp, Panicum virgatum
  misc_feature: Ceres CLONE ID no.1807209
  misc_feature: Encodes the peptide sequence at SEQ ID NO. 456
accccaacagcatcctcctcgcccatctcctcctccctcttcctcattctcggcatcccttcacccgtcgcagacttgcagtctccttcctcctccgcgcgccctttcctagctcgctccgttcacagcggctagcggagcaggagcgaaagcaaaaaaaggccatgggcgccctcctgctcttcgtctgcctcctggcgccgttcgtgctcgcctgcgccgcccgcggcaggcggcggcgggcggcggcgccggcgtcgtcggcgtgcggcaaggcgctgccgctgccgccggggtccatggggtggccgtacgtgggcgagacgttccagctctactcctccaagaaccccaacgtgttcttcgcccggaagcagaaccggtccgggcccatcttcaagacgcacatcctggggtgcccctgcgtgatggtgtccagcccggaggcggcgcgcttcgtgctcgtcacgcaggcgcacctcttcaagcctaccttcccggccagcaaggagcgcatgctgggcccgcaggccatcttcttccagcagggcgactaccacgcccacctccgccgcctcgtctcccgggccttctccccggaggccatccgcgcctccgtgccggccatcgaggccatcgcgctgcgctcgctccgctcctgggacggccagctcgtcaacaccttccaggagatgaagctgtacgcgctgaatgtggcattgctgtccatcttcggcgaggaggagatgcgctacatcgaggagctgaagcagtgctacctgaccctggagaaggggtacaactcgatgccggtgaacctgccgggcaccctgttctacaaggccatgaaggcccgcaagcgcctgggcgacatcgtggcccacatcatctcggcgcgccgcgagcgccggcagcgcgggagagacctcctggcctccttcctggacgaccgcgaggcgctcaccgacgcccagatcgccgacaacgtcatcggcgtcatcttcgccgcccgcgacaccaccgccagcgtcctcacctggatggtcaagttcctcggcgaccacccctcggtgctcaaggccgtcatcgacgagcaggaggagctcgcgcggtccaagtgctcccccgacgcgcccctgacgtgggcggacacccggcggatgcgcatgacgagccgtgtgatccaggagacgatgcgagtggcgtccatcctgtccttcaccttccgggaggccgtggaggacgtggagtaccaagggtacctgatccccaagggctggaaggtgctgcccctgttccggaacatccaccacagccccgaccacttcccctgcccggaaaagtttgacccctcccgattcgaggtggcgcccaagcccaacacgttcatgcccttcggcaacgggacccactcgtgccccggcaacgagctcgccaagctggagatgctcgtgctctttcaccacctcgccaccaagtacaggtggttcacctccaagtccgagagcggcgtgcagttcggccccttcgcgctgccgctcaacggcctgcccatgaccttcacccgcaaggactgatcgagccggcacgcacaggatgcacggtggtattggtattggtatatgctcctacttgtactaagcaatacccaggcacggcacgcggaaaccgctgccggaattgggcgtcggccgcgggcgccggtcgccatcggccatcggatcaggcatgggatcgcagaaagatcacgcaagacgatagcccttgtacagattcttcctcagctctcagctggtaggaccggaccgcaacaagccggaagaggagaccagagacacaaagattaggcgtagccgcgtaggtgtcagtcagtcggtcagtgttaagctaagctaagctgctccagtaggcatcagacgccacaaagaagtggcgctcaactgtaaaccaaacccattttgatcttcttcttatccccccccccctagatttttttttttaaaaaaaaccagccagacagcaccctataggagaagaacaagaaaacaaaaaagaaaggagaagagaggaggcccctgattgggattgtaagcaaaactagttgtccgcctgaaagcaggctggcagctaggccgaataatccatggacggatggatggatgcatcgccggagtcaaaagagaaccacgtcctcgtcccgcagctacggcccgggacggcgacacaccctcttgtattttgtttcgtccaacgcaagagacagtgactgctttcggaacagctactgctcgaactaatttaattgccaagtgcgtgcgc

SEQ ID NO: 456 - protein, 470 aa, Panicum virgatum
  misc_feature: Ceres CLONE ID no.1807209
  misc_feature: Bit score of 283.6 for HMM based on sequences of FIGURE 7.
  misc_feature (42)..(435): Pfam Name: p450 Pfam Description: Cytochrome P450
  misc_feature: Functional Homolog Of Ceres SEEDLINE ID no. ME06336 at SEQ ID NO. 441
MGALLLFVCLLAPFVLACAARGRRRRAAAPASSACGKALPLPPGSMGWPYVGETFQLYSSKNPNVFFARKQNRSGPIFKTHILGCPCVMVSSPEAARFVLVTQAHLFKPTFPASKERMLGPQAIFFQQGDYHAHLRRLVSRAFSPEAIRASVPAIEAIALRSLRSWDGQLVNTFQEMKLYALNVALLSIFGEEEMRYIEELKQCYLTLEKGYNSMPVNLPGTLFYKAMKARKRLGDIVAHIISARRERRQRGRDLLASFLDDREALTDAQIADNVIGVIFAARDTTASVLTWMVKFLGDHPSVLKAVIDEQEELARSKCSPDAPLTWADTRRMRMTSRVIQETMRVASILSFTFREAVEDVEYQGYLIPKGWKVLPLFRNIHHSPDHFPCPEKFDPSRFEVAPKPNTFMPFGNGTHSCPGNELAKLEMLVLFHHLATKYRWFTSKSESGVQFGPFALPLNGLPMTFTRKD

SEQ ID NO: 457 - protein, 485 aa, Taxus x media
  misc_feature: Public GI ID no.60459952
  misc_feature: Bit score of 274.9 for HMM based on sequences of FIGURE 7.
  misc_feature (226)..(453): Pfam Name: p450 Pfam Description: Cytochrome P450
  misc_feature: Functional Homolog Of Ceres SEEDLINE ID no. ME06336 at SEQ ID NO. 441
MDALKQLEVSPSILFVTLAVMAGIILFFRSKRHSSVKLPPGNLGFPLVGETLQFVRSLGSSTPQQFIEERMSKFGDVFKTSIIGHPTVALCGPAGNRLVLSNENKLVQMSWPSSMMKLIGEDCLGGKTGEQHRIVRAALTRFLGPQALQNHFAKMSSGIQRHINEKWKGKDEATVLPLVKDLVFSVASRLFFGITEEHLQEQLHNLLEVILVGSFSVPLNIPGFSYHKAIQARATLADIMTSLIEKRRNELRAGTASENQDLLSVLLTFTDERGNSLADKEILDNFSMLLHGSYDSTNSPLTMLIKVLASHPESYEKVAQEQFGILSTKMEGEEIAWKDLKEMKYSWQVVQETLRMYPPIFGTFRKAITDIHYNGYTIPKGWKLLWTTYSTQTKEEYFKDADQFKPSRFEEEGKHVTPYTYLPFGGGMRVCPGWEFAKMETLLFLHHFVKAFSGLKAIDPNEKLSGKPLPPLPVNGLPIKLYSRS

SEQ ID NO: 458 - protein, 485 aa, Taxus chinensis
  misc_feature: Public GI ID no.62005121
  misc_feature: Bit score of 265.9 for HMM based on sequences of FIGURE 7.
  misc_feature (226)..(449): Pfam Name: p450 Pfam Description: Cytochrome P450
  misc_feature: Functional Homolog Of Ceres SEEDLINE ID no. ME06336 at SEQ ID NO. 441
MDALKQLEVSPSILFVTLAVMVGIILFFRSKRHSSVKLPPGNLGFPLVGETLQFVRTLGSSTPQQFIEERMSKFGDVFKTSIIGHPTVVLCGPAGNRLVLSNENKLVQMSWPSSMMKLIGEDCLGGKTGEQHRIVRAALTRFLGPQALQNHFAKMSSGIQRHINEKWRGKDEVTVLPLVKDLVFSVASRLFFGITEEHLQEQLHNLLEVILVGSFSVPLNIPGFSYHKAMQARATLVDIMTSLIEKRRNELRAGTASENQDLLSVLLTFTDERGNSLADKEILDNFSMLLHGSYDSTNSPLTMLIKVLASHPESYEKVAQEQFGILSTKMEGDEIAWKDLKEMKYSWQVAQETLRMFPPIFGTFRKAITDIHYNGYTIPKGWKLLWTTYSTHTKEGYFKGADQFKPSRFEEEGKHVTPYTYLPFGGGMRGCPGWEFAKMETLLFLHHFVKALSGLKAIDPNEKLSGKPLPPLPVNGLPIKLYSRS

SEQ ID NO: 459 - protein, 490 aa, Pisum sativum
  misc_feature: Public GI ID no.27764533
  misc_feature: Bit score of 272.5 for HMM based on sequences of FIGURE 7.
  misc_feature (234)..(481): Pfam Name: p450 Pfam Description: Cytochrome P450
  misc_feature: Functional Homolog Of Ceres SEEDLINE ID no. ME06336 at SEQ ID NO. 441
MASLWFIFGAIAGALLVLRSLLKNVNWFLYEAKLGDKQYSLPPGDMGWPIIGNMWSFLRAFKSSKPDSFMDSIVKRFGNTGIYKVFMFGFPSVIVTSPEACKKVLTDDENFEPGWPQSTVELIGEKSFIKMPFEEHRRLRRLTSASINGYEALSVYLKYIEEIVISSLEKWTQMGEIEFLTQMRKLTFKIIIHIFLGSESEPVMEALEREYTVLNLGVRAMRINIPGFAFHKSLKARKNLVAIFQSIVDKRRNERRGKEPAPGKKAKDMMDSLIDAVDENGRKLGDDEIIDIMLMYLNAGHESSGHITMWATYFLQRHPEFFRKAKEEQVEMLKRRPPSQKGLKLEDVRKMEYLSKVIDETMRVVTFSLMVFRQARNDVKVNGYLIPKGWRVLTWFRSVHFDSELYPDPREFNPENFSVVRKAGEFLPFGAGTRLCPGNDLAKLEISVFLHHFLLKYELEQLNPKSPIRFLPHTRPLDNCLARIKKQEAA

SEQ ID NO: 460 - protein, 485 aa, Phaseolus vulgaris
  misc_feature: Public GI ID no.86129702
  misc_feature: Bit score of 270.5 for HMM based on sequences of FIGURE 7.
  misc_feature (52)..(478): Pfam Name: p450 Pfam Description: Cytochrome P450
  misc_feature: Functional Homolog Of Ceres SEEDLINE ID no. ME06336 at SEQ ID NO. 441
MAELVLFVSVPAAVLAFGVPAFFKVCTSEYRWRDVGLHGGRDWRKKTKLRFPPGSMGWPYFGETLQLYSQDPNVYFSTKHKRFGEIFKTNILGCPCVMLISPEAARFVLVTQAHLFKPTYPKSKERLIGPFALFFHQGDYHTRLRKLVQRSLSFEALRNLVPHVEALVLSGMNSWGDGQVINMFKEMKRISFEVGILTTFGHLEPRSREELKKNYRIVDAGYNSFPTCIPGTQYKKALLARKRLGKIISDIICERKEKKLVERDLLSCLLNWKGEGGEVLSDDQIADNIIGVLFAAQDTTASAMTWVVKYLHDEPKLLESVKAEQKAIHKSNEGNIPLSWDQTRNMRITHKVVLESLRMASIISFPFREAIADVEYKGFLIPKGWKAMPFGNGVHHACPGNEPQKCNPSRFYVAPKANTFMPFGSGGHACPGYELAKLEMLIMTHHLVTKFRWEAEGSNSGIQYGPFPVPVRGLPARFRKESTNF

SEQ ID NO: 461 - protein, 509 aa, Taxus cuspidata
  misc_feature: Public GI ID no.30350220
  misc_feature: Bit score of 235.6 for HMM based on sequences of FIGURE 7.
  misc_feature (161)..(493): Pfam Name: p450 Pfam Description: Cytochrome P450
  misc_feature: Functional Homolog Of Ceres SEEDLINE ID no. ME06336 at SEQ ID NO. 441
MDVFYPLKSTVAKFNECFPAILFIVLSAVAGIVLPLLLFLRSKRRSSVGLPPGKLGYPFIGESLLFLKALRSNTVEQFLDERVKNFGNVFKTSLIGHPTVVLCGPAGNRLILANEEKLVQMSWPKSSMKLMGEKSITAKRGEGHMIIRSALQGFFSPGALQKYIGQMSKTIENHINEKWKGNDQVSVVALVGDLVFDISACLFFNINEKHERERLFELLEIIAVGVLAVPVDLPGFAYHRALQARSKLNAILSGLIEKRKMDLSSGLATSNQDLLSVFLTFKDDRGNPCSDEEILDNFSGLLHGSYDTTVSAMACVFKLLSSNPECYEKVVQEQLGILSNKLEGDEITWKDVKSMKYTWQVVQETLRLYPSIFGSFRQAITDIHYNGYIIPKGWKLLWTPYTTHPKEMYFSEPEKFLPSRFDQEGKLVAPYTFLPFGGGQRSCPGWEFSKMEILLSVHHFVKTFSTFTPVDPAEIIARDSLCPLPSNGFSVKLFPRSYSLHTGNQVKKI

SEQ ID NO: 462 - protein, 485 aa, Ginkgo biloba
  misc_feature: Public GI ID no.47498770
  misc_feature: Bit score of 240.5 for HMM based on sequences of FIGURE 7.
  misc_feature (224)..(477): Pfam Name: p450 Pfam Description: Cytochrome P450
  misc_feature: Functional Homolog Of Ceres SEEDLINE ID no. ME06336 at SEQ ID NO. 441
MASIFVPVCVSVAVITITCLKKFNGWRYECGLSSKKPLPPGDMGWPLLGNMLSFLIAFKFNRPNSFVSAFVSRFGRTGLYKPFMFGSPTILATTPETCKQVLMDDAHFVPGWPVSTVQLMGRKSFVALSHEDHDRLRKLTAPSINGHEALSNYLGWIEQRVVSAYEDWANQDRIVLLNELKKVTFDIISYIFLSYESKTGTKLASLEREYTSLNMGIRAMAINLPGTAYHKALKARKNLVAILQSVTEERRSSPDPQAKSNKDVLNALLHVKDENGSLLTDEEIIDLLVMYLNAGHESSAHITMWAIIFLVSHPRLYAEAKAEQEKIVNKRPDGQTHLIMYEIREMNYLRKIIDESLRMVNISLMVFREAMDDVEINGYTIPKGWKTQVWLRSVHMDPQVYPNPTKFDPDRWDKLIPKSGMFIPFGAGSRLCPGSDLAKMEICVFIHHLLFHYKIERLNPDCPVRYLPHPRPTDYCKGRVRKLST

SEQ ID NO: 463 - protein, 497 aa, Taxus cuspidata
  misc_feature: Public GI ID no.28380205
  misc_feature: Bit score of 248.4 for HMM based on sequences of FIGURE 7.
  misc_feature (51)..(493): Pfam Name: p450 Pfam Description: Cytochrome P450
  misc_feature: Functional Homolog Of Ceres SEEDLINE ID no. ME06336 at SEQ ID NO. 441
MDSFIFLRSIGTKFGQLESSPAILSLTLAPILAIILLLLFRYNHRSSVKLPPGKLGFPLIGETIQLLRTLRSETPQKFFDDRLKKFGPVYMTSLIGHPTVVLCGPAGNKLVLSNEDKLVEMEGPKSFMKLIGEDSIVAKRGEDHRILRTALARFLGAQALQNYLGRMSSEIGHHFNEKWKGKDEVKVLPLVRGLIFSIASTLFFDVNDGHQQKQLHHLLETILVGSLSVPLDFPGTRYRKGLQARLKLDEILSSLIKRRRRDLRSGIASDDQDLLSVLLTFRDEKGNSLTDQGILDNFSAMFHASYDTTVAPMALIFKLLYSNPEYHEKVFQEQLEIIGNKKEGEEISWKDLKSMKYTWQAVQESLRMYPPVFGIFRKAITDIHYDGYTIPKGWRVLCSPYTTHLREEYFPEPEEFRPSRFEDEGRHVTPYTYVPFGGGLRTCPGWEFSKIEILLFVHHFVKNFSSYIPVDPNEKVLSDPLPPLPANGFSIKLFPRS

SEQ ID NO: 464 - protein, 479 aa, Medicago truncatula
  misc_feature: Public GI ID no.84514135
  misc_feature: Bit score of 238.8 for HMM based on sequences of FIGURE 7.
  misc_feature (221)..(476): Pfam Name: p450 Pfam Description: Cytochrome P450
  misc_feature: Functional Homolog Of Ceres SEEDLINE ID no. ME06336 at SEQ ID NO. 441
MEPNFYLSLLLLFVTFISLSLFFIFYKQKSPLNLPPGKMGYPIIGESLEFLSTGWKGHPEKFIFDRMRKYSSELFKTSIVGESTVVCCGAASNKFLFSNENKLVTAWWPDSVNKIFPTTSLDSNLKEESIKMRKLLPQFFKPEALQRYVGVMDVIAQRHFVTHWDNKNEITVYPLAKRYTFLLACRLFMSVEDENHVAKFSDPFQLIAAGIISLPIDLPGTPFNKAIKASNFIRKELIKIIKQRRVDLAEGTASPTQDILSHMLLTSDENGKSMNELNIADKILGLLIGGHDTASVACTFLVKYLGELPHIYDKVYQEQMEIAKSKPAGELLNWDDLKKMKYSWNVACEVMRLSPPLQGGFREAITDFMFNGFSIPKGWKLYWSANSTHKNAECFPMPEKFDPTRFEGNGPAPYTFVPFGGGPRMCPGKEYARLEILVFMHNLVKRFKWEKVIPDEKIIVDPFPIPAKDLPIRLYPHKA

SEQ ID NO: 465 - protein, 497 aa, Taxus x media
  misc_feature: Public GI ID no.44903417
  misc_feature: Bit score of 242.2 for HMM based on sequences of FIGURE 7.
  misc_feature (51)..(493): Pfam Name: p450 Pfam Description: Cytochrome P450
  misc_feature: Functional Homolog Of Ceres SEEDLINE ID no. ME06336 at SEQ ID NO. 441
MDSFIFLRSIGTKFGQLESSPAILSLTLAPILAIILLLLFRYNHRSSVKLPPGKLGFPLIGETIQLLRTLRSETPQKFFDDRLKKFGPVYMTSLIGHPTVVLCGPAGNKLVLSNEDKLVEMEGPKSFMKLIGEDSIVAKRGEDHRILRTALARFLGAQALQNYLGRMSSEIGHHFNEKWKGKDEVKVLPLVRGLIFSIASTLFFDVNDGHQQKQLHHLLETILVGSLSVPLDFPGTRYRKGLQARLKLDEILSSLIKRRRRDLRSGIASDDQDLLSVLLTFRDEKGNSLTDQGILDNFSAMFHASYDTTVAPMALIFKLLYSNPEYHEKVFQEQLEIIGNKKEGEEISWKDLKSMKYTWQAVQESLRMYPPVFGIFRKAITDIHYDGYTIPKGWRVSCSPYTTHLREEYFPEPEEFRPSRFEDEGRHVTPYTYVPFGGGLRTCPGWEFSKIEILLFVHHFVKNFSSYIPVDPNEKVLSDPLPPLPANGFSIKLFPRS

SEQ ID NO: 466 - DNA, 1672 bp, Triticum aestivum
  misc_feature: Ceres CLONE ID no.846122
  misc_feature: Encodes the peptide sequence at SEQ ID NO. 467
ctccagttctccaacaagatcagtccatctattaatggcgatggtggcagcaggcggaggaggaggtgtactgggcgagtggggctggtggctgggcctcgttttcggtgccgccccgctgctctgcctcgccgtctggaacgccaccgacgcctggtaccgcgctgccttcttcctcaaacacggcagccagcgccgcctcccaccgggccacatgggcctgcccttcctcggcgagacgctctctctgatctggcacttcaagctcgcgcgccgtcctgacgagttcatcgccgccaagaggcgtgcgcacggcggcgccggggccggcctctaccgcacgcacctcttcggctcccccgctgtcatcgcctgttcgccggccgccaacaagttcgttcttcagtcccccgacaacttcggtgcgcggtggcccgtgccggagcttgtgggcatcacgtccgtggtgaacgttgagggtgccacccatgccaggctccgcgggttcatcaccgcagccatcaaccggccgagctcgcttcggaccatcgccgccgtcatgcagccccgcatcatggtggcgctggcctcttgggccgacatggggaccatcgtcgctgccaccgagatcaagaatgtgacgttcgccaacatctgcaagatgttcattagcatggagccttctccattgacggagaagatcgacaagttgttccgtgacttggttgctggccttaggtcattccccttggattttccagggacaacatttcatagtgctcgcaagtgtcgtcggaagctaaacgctatctttcgagaggagctggaggcgaggaagaaggtgggcagggagtgtgatgatctcatgggtgggctgatgcacatggaggacgagcaggggaggaagttgagggacgaggaggtggtggacaacatcgtctccctcgtcatcgctggatacgagtctaccgccagcgccatcatgtgggctacctaccacctcgccaaatcccccgtcgccctagccaagctccgggaggagaatatggcggtgagcaaaagcaaaggggcatcgtcaatgatcacccatgacgacctcccgaatatgaagtacaccgcgaaggtagtggaggagacaattcggatggctaacatatcgccgatgttgcaccgtgtggcgaacagggatgtggatcacaatgggtacacgataccggcgggttggtcggtggtagtgtgggtgaggtcgctgcacactgatcccggcaattacgagaaccccctcaccttcaaccctgacagatgggatgagccagcaaagccagggacgtaccttgtgttcggaggcggctacaggatctgtgctggcaacatgctcgctaggttgcagctcaccatcatgcttcatcatctctccattggctatgaatgggagttgctgaaccctgatgcagagattgattacctcccaaacccaaggccagcggatggtgcagtcatgtccttccgtaagcttagcacctgatcaagatgtgatcaatgacatttctctctcatctaaaaataaaccattgtggtggttgtggtgcacacattgtagttaacaagatgataccccacacgttgtggccatgttttgcaatatatttcaatgagacatgattgtatggac

SEQ ID NO: 467 - protein, 494 aa, Triticum aestivum
  misc_feature: Ceres CLONE ID no.846122
  misc_feature: Bit score of 245.5 for HMM based on sequences of FIGURE 7.
  misc_feature (283)..(458): Pfam Name: p450 Pfam Description: Cytochrome P450
  misc_feature: Functional Homolog Of Ceres SEEDLINE ID no. ME06336 at SEQ ID NO. 441
MVAAGGGGGVLGEWGWWLGLVFGAAPLLCLAVWNATDAWYRAAFFLKHGSQRRLPPGHMGLPFLGETLSLIWHFKLARRPDEFIAAKRRAHGGAGAGLYRTHLFGSPAVIACSPAANKFVLQSPDNFGARWPVPELVGITSVVNVEGATHARLRGFITAAINRPSSLRTIAAVMQPRIMVALASWADMGTIVAATEIKNVTFANICKMFISMEPSPLTEKIDKLFRDLVAGLRSFPLDFPGTTFHSARKCRRKLNAIFREELEARKKVGRECDDLMGGLMHMEDEQGRKLRDEEVVDNIVSLVIAGYESTASAIMWATYHLAKSPVALAKLREENMAVSKSKGASSMITHDDLPNMKYTAKVVEETIRMANISPMLHRVANRDVDHNGYTIPAGWSVVVWVRSLHTDPGNYENPLTFNPDRWDEPAKPGTYLVFGGGYRICAGNMLARLQLTIMLHHLSIGYEWELLNPDAEIDYLPNPRPADGAVMSFRKLST

SEQ ID NO: 468 - protein, 497 aa, Taxus chinensis
  misc_feature: Public GI ID no.24266823
  misc_feature: Bit score of 237.3 for HMM based on sequences of FIGURE 7.
  misc_feature (51)..(493): Pfam Name: p450 Pfam Description: Cytochrome P450
  misc_feature: Functional Homolog Of Ceres SEEDLINE ID no. ME06336 at SEQ ID NO. 441
MDSFIFLRSIGTKFGQLESSPAIISLTLAPILAIILLLLFRYNHRSSVKLPPGKLGFPLIGETIQLLRTLRSETPQKFFDDRLKKFGPVYMTSLIGHSTVVLCGPAGNKLALSNEDKLVEMEGPKSFMKLIGEDSIVAKRGEDHRILRTALARFLGAQALQNYLGRMSSEIGHHFNKKWKGKDEVKVLPLVRGLIFSIASTLFFDANDGHQQKQLHHLLETILVGSLSVPLDFPGTRYRKGLQARLKLDEILSSLIKRRRSDLRSGIASDDQDLLSVLLTFRDEKGNSLTDQGILDNFSAMFHASYDTTVAPMALIFKLLYSNPEYHEKVFQEQLEIIGNKKEGEEISWKDLKSMKYTWQAVQESLRMYPPVFGIFRKAITDIHYDGYTIPKGWRVLCSPYTTHLREEYFPEPEKFRPSRFEDEGRHVTPYTYVPFGGGLRTCPGWEFSKIEILLFVHHFVKNFSSYIPVDPNEKVLSDPLPPLPANGFSIKLFPRS

SEQ ID NO: 469 - protein, 499 aa, Taxus cuspidata
  misc_feature: Public GI ID no.64180315
  misc_feature: Bit score of 232.9 for HMM based on sequences of FIGURE 7.
  misc_feature (53)..(495): Pfam Name: p450 Pfam Description: Cytochrome P450
  misc_feature: Functional Homolog Of Ceres SEEDLINE ID no. ME06336 at SEQ ID NO. 441
MDALYKSTVAKFNEVTQLDCSTESFSIALSAIAGILLLLLLFRSKRHSSLKLPPGKLGIPFIGESFIFLRALRSNSLEQFFDERVKKFGLVFKTSLIGHPTVVLCGPAGNRLILSNEEKLVQMSWPAQFMKLMGENSVATRRGEDHIVMRSALAGFFGPGALQSYIGKMNTEIQSHINEKWKGKDEVNVLPLVRELVFNISAILFFNIYDKQEQDRLHKLLETILVGSFALPIDLPGFGFHRALQGRAKLNKIMLSLIKKRKEDLQSGSATATQDLLSVLLTFRDDKGTPLTNDEILDNFSSLLHASYDTTTSPMALIFKLLSSNPECYQKVVQEQLEILSNKEEGEEITWKDLKAMKYTWQVAQETLRMFPPVFGTFRKAITDIQYDGYTIPKGWKLLWTTYSTHPKDLYFNEPEKFMPSRFDQEGKHVAPYTFLPFGGGQRSCVGWEFSKMEILLFVHHFVKTFSSYTPVDPDEKISGDPLPPLPSKGFSIKLFPRP

SEQ ID NO: 470 - protein, 500 aa, Taxus cuspidata
  misc_feature: Public GI ID no.34559857
  misc_feature: Bit score of 224.7 for HMM based on sequences of FIGURE 7.
  misc_feature (250)..(468): Pfam Name: p450 Pfam Description: Cytochrome P450
  misc_feature: Functional Homolog Of Ceres SEEDLINE ID no. ME06336 at SEQ ID NO. 441
MDALSLVNSTVAKFNEVTQLQASPAILSTALTAIAGIIVLLVITSKRRSSLKLPPGKLGLPFIGETLEFVKALRSDTLRQFVEEREGKFGRVFKTSLLGKPTVILCGPAGNRLVLSNEEKLLHVSWSAQIARILGLNSVAVKRGDDHRVLRVALAGFLGSAGLQLYIGKMSALIRNHINEKWKGKDEVNVLSLVRDLVMDNSAILFFNIYDKERKQQLHEILKIILASHFGIPLNIPGFLYRKALKGSLKRKKILSALLEKRKDELRSRLASSNQDLLSVLLSFRDERGKPLSDEAVLDNCFAMLDASYDTTTSQMTLILKMLSSNPECFEKVVQEQLEIASNKKEGEEITMKDIKAMKYTWQVLQESLRMLSPVFGTLRKTMNDINHDGYTIPKGWQVVWTTYSTHQKDIYFKQPDKFMPSRFEEEDGHLDAYTFVPFGGGRRTCPGWEYAKVEILLFLHHFVKAFSGYTPTDPHERICGYPVPLVPVKGFPIKLIARS

SEQ ID NO: 471 - protein, 495 aa, Taxus canadensis
  misc_feature: Public GI ID no.67633430
  misc_feature: Bit score of 256.2 for HMM based on sequences of FIGURE 7.
  misc_feature (255)..(463): Pfam Name: p450 Pfam Description: Cytochrome P450
  misc_feature: Functional Homolog Of Ceres SEEDLINE ID no. ME06336 at SEQ ID NO. 441
MDAMDLTVAKFKEFTQLQSSAILLTVVSGIIVIVILLLRSKRRSSLKLPPGKLGLPLIGESLSFLWALRSNTLEQFVDKRVKKYGNVFKTSLLGQPTVVLCGAAGNRLILSNQEKLLSRTVSDRVAKLTGDTSISVIAGDSHRIIRAAVAGFLGPAGLKIHIGEMSAHIRNHINQVWKGKDEVNVLSLARELVFAISASLFLNINDREEQHQLHKTLETILPGYFSVPINFPGFAFRKALEGNSKRRKHFSVLQEKRRRDLSVGLASRTQDLLSVLLAYEDDKGNPLTDEEVLDNISALIDGSYESTSSQMAMLLKLLSDHPECYEKVVQEQLEIASHKKEGEEITWKDVKAMRYTWQVMQETLRMFAPVFGPRGKAITDIHYDGYTIPKGWQLSWATYSTHQNDTYFNEPDKFMPSRFDEEGGRLAPYTFVPFGGGRRKCPGWEFAKTEILLFVHHFVKTFSAYTPIDPHESIWGRPLPPVPANGFPIKLISRS

SEQ ID NO: 472 - protein, 474 aa, Artemisia annua
  misc_feature: Public GI ID no.86279656
  misc_feature: Bit score of 202.4 for HMM based on sequences of FIGURE 7.
  misc_feature (208)..(445): Pfam Name: p450 Pfam Description: Cytochrome P450
  misc_feature: Functional Homolog Of Ceres SEEDLINE ID no. ME06336 at SEQ ID NO. 441
MVDLILIYSIFLSLIVVLVPLSLYFVFYKSKPVVDRKLPPGQTGWPVIGETLEFLTNGWKGHPEKFIFDRMARFSPHVFKTSLMLEDAAVFCGSAGNKFLFSNENKLVKAWWPASVEKILPSAKETTNQRKMLSRSFRPESLRQYVPVMDMMAQRHFKTEWDGMDQIVTHEVTQNFTFSLACKIFVSIEDPEEVKHLSGPFEKFAPGIFSIPIDLPWTPLRRAIHAGNFIRKEIIAIIKQRKIDLADGKASPTQDILSQMLCDEESQNIAEADTADVIIGLLIGGHDNASSTCAFIVKFLADLPEIYEGVLKEQLEIAKFKAPGELLNWEDLSKMKYSWNVACEVLRLAPPLQGSFREAMTDFVYNGYSIPKGWKLYWSALSTHKNPEVFTEPQKLDPSRFDGKGPAPYTFVPFGGGPHMCPGREYARLEILVFMHHLVIKYKWEKVIPNEQIIVNPMPKLAKGLPLRLYPRYA

SEQ ID NO: 473 - protein, 502 aa, Taxus chinensis
  misc_feature: Public GI ID no.53759170
  misc_feature: Bit score of 234.4 for HMM based on sequences of FIGURE 7.
  misc_feature (53)..(495): Pfam Name: p450 Pfam Description: Cytochrome P450
  misc_feature: Functional Homolog Of Ceres SEEDLINE ID no. ME06336 at SEQ ID NO. 441
MDALYKSTVAKFNEVTQLDCSTESFSIALSSIAGILLLLLLFRSKRHSSLKLPPGKLGIPFIGESFIFLRALRSNSLEQFFDERVKKFGLVFKTSLIGHPTVVLCGPAGNRLILSNEEKLVQMSWPAQFMKLMGENSVATRRGEDHIVMRSALAGFFGPGALQSYIGKMNTEIQNHINEKWKGKDEVNVLPLVRELVFNISAILFFNIYDKQEQDRLHKLLETILVGSFALPIDLPGFGFHRALQGRATLNKIMLSLIKKRKEDLQSGSATATQDLLSVLLTFRDDKGTPLTNDEILDNFSSLLHASYDTTTSPMALIFKLLSSNPECYQKVVQEQLEILSNKEEGEEITWKDLKAMKYTWQVAQETLRMFPPVFGTFRKAITDIQYDGYTIPKGWKLLWTTYSTHPKDLYFSEPEKFMPSRFDQEGKHVAPYTFLPFGGGQRSCVGWEFSKMEILLFVHHFVKTFSSYTPVDPDEKISGDPLPPLPSKGFSIKLFPETIVN

SEQ ID NO: 474 - protein, 493 aa, Taxus chinensis
  misc_feature: Public GI ID no.38481843
  misc_feature: Bit score of 204.9 for HMM based on sequences of FIGURE 7.
  misc_feature (250)..(461): Pfam Name: p450 Pfam Description: Cytochrome P450
  misc_feature: Functional Homolog Of Ceres SEEDLINE ID no. ME06336 at SEQ ID NO. 441
MDALSLVNSTVAKFNEVTQLQASPAILSIALTAIAGIIVLLVITSKRRSSLKLPPGKLGLPFIGETLEFVKALRSDTLRQFVEEREGKFGRVFKTSLLGKPTVILCGPAGNRLVLSNEEKLLHVSWSAQIARILGLNSVAVKRGDDHRVLRVALAGFLGSAGLQLYIGKMSALIRNHINEKWKGKDEVNVLSLVRDLVMDNSAILFFNIYDKERKQQLHEILKIILASHFGIPLNIPGFLYRKALKGSLKRKKILSALLEKRKDELRSGLASSNQDLLSVLLSFRGDEAVLDNCFAMLDASYDTTTSQMTLILKMLSSNPECFEKVVQEQLEIASNKKEGEEITMKDIKAMKYTWQVLQESLRMLSPVFGTLRKIMNDINHDGYTIPKGWQVVWTTYSTHQKDIYFKQPDNFMPSRFEEEDGHLDAYTFVPFGGGRRACPGWEYAKVGILLFLHHFVKAFSGYTPTDPHERICGYPVPLVPIKGFPIKLIARS

SEQ ID NO: 475 - protein, 485 aa, Taxus cuspidata
  misc_feature: Public GI ID no.48869189
  misc_feature: Bit score of 179.4 for HMM based on sequences of FIGURE 7.
  misc_feature (223)..(481): Pfam Name: p450 Pfam Description: Cytochrome P450
  misc_feature: Functional Homolog Of Ceres SEEDLINE ID no. ME06336 at SEQ ID NO. 441
MNTFSFLEFIQLQSILFLTLLALLLLCLFRYKTQSSAVKLPPGNLGFPFIGETIPFLRALHSETPQTFFDERMKRFGNVFVTSLIGQPIVVLCGPAGNRLLLSNEDKLVEMSPPKFSLKLIGQDSLLSKREDEHRTLRAALARFLRPQALQSYMGIMSSEIEHHINEKWKGKDEVKMLPLIRGLIFSIATTLFFDINDEHLKDRLHHLLETILVGTVSLPLDFPGTSFRKAVEARSKLDEILSSLIKSRRSDLHSGIASDGQDLLTVLLTFKDERGNSLADNEILDNFSLMLHASYETSVSPTVLMFKLLSSNPECYDKLVQEQLGILANKKEGEDISWKDVKAMKYTWQVVQETMRIFPPGFGSYRKAIIDIDYDGYTIPKGWQLYDALYYTWERTVLPYPEQFRPSRFEEGELVAPYTFLPFGAGARICPGWEFAKTEILLFVHHFVKNFSSYHLVDPKEKISGNPFPPLPNNGFSLKVFPRS

SEQ ID NO: 476 - DNA, 1844 bp, Zea mays
  misc_feature: Ceres CLONE ID no.1691419
  misc_feature: Encodes the peptide sequence at SEQ ID NO. 477
agcccaacaccccgccaactaccccaagtttgatcgagctctctccacgccagcatacttgcaatggctttcatcgtgctccttgctgctgcagcagcggcaatagccttcgtcctcctccacctcctcagtgcccaaaaaaagcgcagcagcaggtctgcaggctcgacgtcctacagcctaccgcccggcgacctcggcgtccccgtcatcggccagaccttctccctcctccacgcgctgcgcagcaacacggacgaccagtggttcagggcgcggatcaagaggtacggcccggtgtccaagatgtcggtgctgggctcgccgacggtgctgctggccgggacggaggccaaccacttcatattcaccaaccagggcctcatcctcacgcagacgcgcgcgctccgctccctcctccgccgctccatcctcacgctcaccggcgacgacctgaagcaggtgcgcagcgcgctgcagggctacttaaggcctgagatggtccgggggtacgtggggaagatggacgccgaggtcaggaggcagctcaagctcaactgggttggtcgcagcactgtcaacgtcctgccgatggcgaggagccttacactaggggtcatctgctccgtcgtcttcggcgaagaagcagccgccatagtagacgccctagctactgacttccagcagctaggtgacgcgatcctgtcgttcccagtcaacatccccttcacgaggttcggcaagggcatgcggtcgagcgccaagatcagggaggccatcacgaagttcgccaggaagagggaggaggagtactccttgctgctgtcgcaggacgaagggtgcaccgccactgctactgctacgacttcagccgccaccgacttcgtcacctacatgctcctcctgcgctccaggggcgcgcactccctctcgctggcggacatcgtcgacaacgtgatgggcatcgtcatcggcgcgcacggcaccacctcgacgctcatcaccttcatggtgcgccacctcgccaacgagccagacgtcctcgccaagatcacccaagaacaagatgagatcgctggcagaaacggaagagacggtgctctaacatgggaagacgtttcgagcatgaagtacacatggagggcggcgctggagacgctgcgcacggtgccgccggtgttcgggagcttcaggactgccaccaaggacatcgaataccagggctacctcatccccaagggctggaaagtcttcgcatcccagagcatcacgcacatggatcccaggttcttcgccgaacccaccaagttcgatccgtcccgcttcgagaagcgctcgtcgatcccgccgtacagcttcctgccgttcgggggagggccaaggatgtgccctggaaccgagttctccagggtggaaaccatggtggccatgcactatctagtgacgcggttcaggtggaagctgcgcttcgaagacgaagcctacaacaaggatcccaaacctacgcctgttttcggatgtccagtggaactggagctgagaaaaccccctgcaatataatagctgatggtgcttgaaatgatgctttaatattgtacgcccattgattgtaaaatgtacaggctgcttgtttggctgtggccaaaccattgttgtccgtccagcaatacttggcctaagaagagtgcatggatatgtttgggtgtgcagttttcatgtgtagatgtatatacactgaagaagtagatatatatataggtgtcacttgtaattagtttaggtttctatatatgttgtgattgtgtaatgtcaatggcataatattaggcagatcatcaaaactt

SEQ ID NO: 477 - protein, 498 aa, Zea mays
  misc_feature: Ceres CLONE ID no.1691419
  misc_feature: Bit score of 181.4 for HMM based on sequences of FIGURE 7.
  misc_feature (168)..(495): Pfam Name: p450 Pfam Description: Cytochrome P450
  misc_feature: Functional Homolog Of Ceres SEEDLINE ID no. ME06336 at SEQ ID NO. 441
MAFIVLLAAAAAAIAFVLLHLLSAQKKRSSRSAGSTSYSLPPGDLGVPVIGQTFSLLHALRSNTDDQWFRARIKRYGPVSKMSVLGSPTVLLAGTEANHFIFTNQGLILTQTRALRSLLRRSILTLTGDDLKQVRSALQGYLRPEMVRGYVGKMDAEVRRQLKLNWVGRSTVNVLPMARSLTLGVICSVVFGEEAAAIVDALATDFQQLGDAILSFPVNIPFTRFGKGMRSSAKIREAITKFARKREEEYSLLLSQDEGCTATATATTSAATDFVTYMLLLRSRGAHSLSLADIVDNVMGIVIGAHGTTSTLITFMVRHLANEPDVLAKITQEQDEIAGRNGRDGALTWEDVSSMKYTWRAALETLRTVPPVFGSFRTATKDIEYQGYLIPKGWKVFASQSITHMDPRFFAEPTKFDPSRFEKRSSIPPYSFLPFGGGPRMCPGTEFSRVETMVAMHYLVTRFRWKLRFEDEAYNKDPKPTPVFGCPVELELRKPPAI

SEQ ID NO: 478 - DNA, 1799 bp, Glycine max
  misc_feature: Ceres CLONE ID no.661613
  misc_feature: Encodes the peptide sequence at SEQ ID NO. 479
aatcacgcgaggatccaaatccaaaaaaatcatggagcagttgtactacctcacccttgtgctactgtttgtgtccttcgtctctgtctcttttttcatcattttctacaggcatcgttctccgttcagcgtccccaacttgccgccggggaaggcggggtttccggtgatcggcgagagcctggagtttctgtcggcgggacggaaggggcttccggagaagttcttctccgatcgcatgacagagtactcttccaaagtgttcaagacctccatcttaggggagcctacagtgattttctgtggagccgcatgtaacaagttcttgttttctaacgagaacaaacacgtcatttcgtggtggcctgaaaatgtcaagaagttgttcccaacgaatattcaaacaaactctaaggaagaagccaagaagttgagaaacattctccctcagttcctcagcgccaaagccatccaacgttacgttggtattatggacactgttgcccaaagacactttgctctggagtgggagaacaacacccaagtcaccgtattgcccttggccaagaggtatacctttggggtggctagccgtgtgttcatgagcattgatgatttgaatcaagtggcgaaattggcagaacctttaaatcaggtgaatgcaggaattatatcaatgcccattaacttccccggaactgtgttcaaccgaggaatcaaggcctccaagttcattaggagggagctgttgaggattgtcaagcagaggaaggtggaactagctaatggaatgtccacaccaacacaagacattttgtctcacatgctaatatattgtgatgagaatggacaatatttggctgaacatgatattgtcaacaagatccttggcttgctgataggtagccatgaaaccacaagtactgtttgcactttcgttgtcaaataccttgccgagctccctcaaaatatttatgaaaatgtctatcaagaacaaatggcgattgcaaaatccaaagctccaggagagttgttgaattgggatgacatccagaagatgaaatattcatggaatgtagcttgtgaagtaataaggcttaaccctccagcccaaggagcttttagggaagccatcaatgactttatcttcgatggattctcaattccaaaaggctggaagttgtattggagtgcaaattcaactcacaaaaatccagagtacttccctgagccagagaaatttgatccaagcagatttgaaggaactggaccagctccttatacttatgtgccatttggtggagggccaagtatgtgccctggaaaagagtatgcgcgaatggaactattggtgttcatgcacaacttagtgaagaggttcaagtgtgaaactctttttcctaatggaaatgttacttataaccctacgcctattcctgccaagggccttcctgttcgtcttattcctcaccgatcatgaaggaattaattatatttggatgggtgaacctatgtcaactcttatgcagaaacggtatggcataaagcctgcccaatgtcagcaattgcattttagtttgttattttttattaattgtttgatcaagtttttaggattagttgttttattttctgttacttaatagttgttatgttaatggttagttattgttatgttagtagtttgttattgttatgttattgtttggttattatttagcacatcagtaattattacttctttttgttccaataaattgtatttaaacagatgatcatttaatagaaaagtgtgtacc

SEQ ID NO: 479 - protein, 482 aa, Glycine max
  misc_feature: Ceres CLONE ID no.661613
  misc_feature: Bit score of 185.7 for HMM based on sequences of FIGURE 7.
  misc_feature (220)..(479): Pfam Name: p450 Pfam Description: Cytochrome P450
  misc_feature: Functional Homolog Of Ceres SEEDLINE ID no. ME06336 at SEQ ID NO. 441
MEQLYYLTLVLLFVSFVSVSFFIIFYRHRSPFSVPNLPPGKAGFPVIGESLEFLSAGRKGLPEKFFSDRMTEYSSKVFKTSILGEPTVIFCGAACNKFLFSNENKHVISWWPENVKKLFPTNIQTNSKEEAKKLRNILPQFLSAKAIQRYVGIMDTVAQRHFALEWENNTQVTVLPLAKRYTFGVASRVFMSIDDLNQVAKLAEPLNQVNAGIISMPINFPGTVFNRGIKASKFIRRELLRIVKQRKVELANGMSTPTQDILSHMLIYCDENGQYLAEHDIVNKILGLLIGSHETTSTVCTFVVKYLAELPQNIYENVYQEQMAIAKSKAPGELLNWDDIQKMKYSWNVACEVIRLNPPAQGAFREAINDFIFDGFSIPKGWKLYWSANSTHKNPEYFPEPEKFDPSRFEGTGPAPYTYVPFGGGPSMCPGKEYARMELLVFMHNLVKRFKCETLFPNGNVTYNPTPIPAKGLPVRLIPHRS

SEQ ID NO: 480 - protein, 487 aa, Medicago truncatula
  misc_feature: Public GI ID no.92892075
  misc_feature: Bit score of 153.3 for HMM based on sequences of FIGURE 7.
  misc_feature (203)..(481): Pfam Name: p450 Pfam Description: Cytochrome P450
  misc_feature: Functional Homolog Of Ceres SEEDLINE ID no. ME06336 at SEQ ID NO. 441
MELQWFWMFAATLLACYIFVSKVMRNLNGWYYDLIFKNKQYPLPPGDMGWPLIGNLWSFFKYFYSGRGEMFINNIIFKFGRTGIYKTHLYGSPSIIVIAPAICKKVLIDEVTFKIGYPKSALELGDSKILHKERGRFKQLVSSPINGHNVLEMYLERIEDIVINKLEELSSMKHPVEFLTEMKKASFEFVIHIFFDSCDQDTVNKIGDLFNVMSIALLSFMPINVPGFAYNKALKARMEFVKIIENIICGRRMAIKNGQIGENNNLLDIILETKDERGEKLEDKDIIDLLIAFLFGAHDSIATASMWSVMYLAQNPLCLKKAKEEQEGILKARSTSQKRLSIEEIKKMIYLSQVVDETIRHITIFSAFREAAIDVNINGYFIPKGWKVLVWLSALHMDPEYYSNPKEFNPTRWDDYNPGSGTFIPFGVGRRLCPGRDLAKYEISIFLHYFVLNYKLERINPECPITSFPYSKPIDNCLAKVIKISDS

SEQ ID NO: 481 - protein, 388 aa, Medicago truncatula
  misc_feature: Public GI ID no.84514201
  misc_feature: Bit score of 134.7 for HMM based on sequences of FIGURE 7.
  misc_feature (211)..(387): Pfam Name: p450 Pfam Description: Cytochrome P450
  misc_feature: Functional Homolog Of Ceres SEEDLINE ID no. ME06336 at SEQ ID NO. 441
MELSIMLCFFTSILFIVLFRIFIKSFVSKRHDLPLPPGSMGWPYIGETFQLYSQDPNVFFASKIKRYGSMFKSHILGCPCVMISSPEAAKFVLNKAQLFKPTFPASKERMLGKQAIFFHQGEYHANLRRLVLRTFMPVAIRNIVPDIESIAEDSLKSMEGRLITTFLEMKTFTFNVALLSIFGKDEIHYREQLKQCYYTLEKGYNSMPINLPGTLFHKAMKARKELAQILAQIISSRREKKEEYKDLLGSFMDEKSGLSDEQIANNVIGVIFATRDTTASVLTWIVKYLGENISALESVIEEQESILKSKEENGEEKGLNWEDTKKMVITSRVIQETLRVASILSFTFREAVEDVEYQGYLIPKGWKVLPLFRNIHHSPNNFKDPEKV

SEQ ID NO: 482 - protein, 495 aa, Taxus chinensis
  misc_feature: Public GI ID no.55668263
  misc_feature: Bit score of 227.3 for HMM based on sequences of FIGURE 7.
  misc_feature (245)..(463): Pfam Name: p450 Pfam Description: Cytochrome P450
  misc_feature: Functional Homolog Of Ceres SEEDLINE ID no. ME06336 at SEQ ID NO. 441
MDAMDLTVAKFKEFTQLQSSAILLTAVSGIIVIVILLLRSKRRSSLKLPPGKLGLPLIGESLSFQWALRSNTLEQFVDKRVKKYGNVFKTSLLGQPTVVLCGAAGNRLILSNQEKLLSRTVSDRVAKLTGDNSISVIVGDSHRIIRAAVAGFLGPAGLQIHIGEMSAHIRNHINQVWKGKDEVNVLSLARELVFATSASLFLNINDREEQHQLHKTPETILAGYFSVPINFPGFAFRKALEGNSKRRKHFSVLLEKRRRDLSLGLASRNQDLLSVLLTFKDDKGNPLTDEDDLDNISALIDGSYESTSSQMAVLLKLLSAHPQCYEKVVQEQLEIASHKKEGEEITWKDVKAMRYTWQVMQETLRMFAPVFGPRGKAITDIHYDGYTIPKGWQLSWATYSTHQNDTYFNEPDKFMPSRFDEEGGRLAPYTFVPFGGGRRTCLGWEFAKTEILLFVHHFVKTFSAYTPIDPHESIRGRPLPPVPANGFPIKLISRS

SEQ ID NO: 483 - DNA, 1320 bp, Gossypium hirsutum
  misc_feature: Ceres CLONE ID no.1919620
  misc_feature: Encodes the peptide sequence at SEQ ID NO. 484
aaaacacagagaagtgaagaaatggagttagatttgtggagtattgctataattgtggtaacatttgttgtttcatttggattccttaagaaagcttatgagagattagggcagcagcagcttaagtccctccctccaggtgatatgggatggccattgattgggaatacgtggtctttcataagagcttacaaatcccaaaacccagaatctttcatcaacaatttgaagaaaaggtacggtaaaacagggatttacaagacccatttgtttgggaaggcaagcatcttagtttgcagtgcggagttatgtaagaaagtgttgacagatgacaataactttcaatggggctaccctgtttcaaatctgattcagggtgatgtgccattcgactacatgtctagtcacaggcgacttcacaggctagtgacaacggttctcaatcaacaccaacccccttcatcgcatttagggaccattgagaaaatcgttatcaacacactggaagaatggagtaagatgaaggaaccgatccttttcgttcctgaggtgaataagtttgtgttcaaactcattatagccatctttcttggctctggaactgacgataatcaaattgcatccatggaggagtattatagaaaagtatactatggattacataccactcccattaacatccctggttttgcataccatagagcagtccaggcaaggaaggtgctggtgaataagattcgaggtgtattgggtgaaaggagagagaggagatgtaatgaccccgacccaaacacaggcataatcgactttttggagaaagctgattatgaggatagtagacctatgagccatgaacaccttgttgttttattaatcgggctcttcattgcgggtcgtgaaactacatctcgaacggctatatgggccaccatctatctccataatcatccccatctgttgcataaggccaaggaagagcaggaggaaatcgtgaaaagaagaccttcttcccagaaaggtttaaccttcaccgaaattaaacaaatgaaatatctatccaaggtgattaatgagacactacgaatacgcaccaataatttttcaatctttcgagaagcaaaaaatgtaacttatctcaatggctaccagataccacaaggctggaaagtgttggtatggacaagtgcagttcatatggaccctgaaatttatcccaacccaaaccasttccttccttcaagatgggatgattttatacccatagccggggcttttctacccttttcaacaggaagtagtacctgtcctggagctgatttg

SEQ ID NO: 484 - protein, 433 aa, Gossypium hirsutum
  misc_feature: Ceres CLONE ID no.1919620
  misc_feature: Bit score of 123.2 for HMM based on sequences of FIGURE 7.
  misc_feature (220)..(430): Pfam Name: p450 Pfam Description: Cytochrome P450
  misc_feature: Functional Homolog Of Ceres SEEDLINE ID no. ME06336 at SEQ ID NO. 441
  misc_feature (402)..(402): Xaa is any aa, unknown, or other
MELDLWSIAIIVVTFVVSFGFLKKAYERLGQQQLKSLPPGDMGWPLIGNTWSFIRAYKSQNPESFINNLKKRYGKTGIYKTHLFGKASILVCSAELCKKVLTDDNNFQWGYPVSNLIQGDVPFDYMSSHRRLHRLVTTVLNQHQPPSSHLGTIEKIVINTLEEWSKMKEPILFVPEVNKFVFKLIIAIFLGSGTDDNQIASMEEYYRKVYYGLHTTPINIPGFAYHRAVQARKVLVNKIRGVLGERRERRCNDPDPNTGIIDFLEKADYEDSRPMSHEHLVVLLIGLFIAGRETTSRTAIWATIYLHNHPHLLHKAKEEQEEIVKRRPSSQKGLTFTEIKQMKYLSKVINETLRIRTNNFSIFREAKNVTYLNGYQIPQGWKVLVWTSAVHMDPEIYPNPNXFLPSRWDDFIPIAGAFLPFSTGSSTCPGADL

SEQ ID NO: 485 - DNA, 1691 bp, Gossypium hirsutum
  misc_feature: Ceres CLONE ID no.1946684
  misc_feature: Encodes the peptide sequence at SEQ ID NO. 486
atccattaaattttcccacgctttctttctcaagtaagctaaaaatcgccacggaaatggagatggagctttctccacttgtttcactcactgctcctactagtcttctcacacttgctattattttcgttgtcatctttgcactaagacccaaacccaaatcgagtagcgacaaagagcttccaccagggagcttagggtggccaatcgtcggcgaaactctcgagttcctgttggggaacccggaaaatttcgtgtttaatcggatgagaaaatattctcctcgtattttcaaaacaaagattctcggcgaagaaaccgtcgtcatatgtggtccggaaggacacaaatttttgttctcaaacgaacaaaagctcttcaccgctttccgacttcactccacccagaaactattccgatcttaccagtcctcctccgccacgtccgtacaaagctcctgcgacacagactcgaaaaaaatcttgcgttcgccgggattcttgaaacccgaagcattaatgaggtatttaggcaaaatggacgccataacacagcaacaaatggagaaatactgggaaaaaaaagaccaagtgaaggcgtttccactcgcaaagaccttaactttgactctcgcatgtcgtttctttttaggaatcgatgaaccagagcgtatctccaggcttgttaaaagtttcgacgatataactttggggatgcattcgattcctttggattttccggggacggctttttataaagctaataaggctgcggcagcgatacggagggagcttaaggaggttataaaagagaagaaagctgctatggtgacggaagttgccatgcaagatatactttgtcatatgattgtggccaccgatgagaccggcaaatacatggcggaagctgagattgccgataagattatgggattgttggtcgccggatacagcaccgtcgctactgctataaccttcttcatgaaatacgttggcgagagacctcacatctatgccaaaattctagcagaacaattgcaagtagaaggtgataaaaaggcaggggagatgttggaatgggatgacatacaaaaaatgaaatattcatggaatgtgatgtatgaagtgatgagactcacacctccactccaaggcactttcagagaggccctcactgattttacttatgctggttacactgttccaaagggttggaagatatattggacggtaagcacaacaaacaagaacccagaatattttccggaaccggagaaattcgatccatcgagatacgatgaagggaacaaactgccgccgtttacatacgttccgttcggcggtgggcctcgaatgtgccccggaaaagagtatgcaagattggctatcctcgctttcgtgcataacgttgtgaaaaggtttcaatgggaattggtgaatccaaaggaaaagattgttggtgatatgatgccaacacccaataatggtcttcctattcgtctaactctacgccattaaaagacctactagttttcgcacctagaaaattataaaggttaaattgtagtttaagtccctctacttaaaatttgacatttagtccttatgttttagtttttcataatttgatctctgacatcagttagaacaaatatttaatcatgaaggaaaaattaagatgtttattttcgg

SEQ ID NO: 486 - protein, 486 aa, Gossypium hirsutum
  misc_feature: Ceres CLONE ID no.1946684
  misc_feature: Bit score of 160.2 for HMM based on sequences of FIGURE 7.
  misc_feature (227)..(480): Pfam Name: p450 Pfam Description: Cytochrome P450
  misc_feature: Functional Homolog Of Ceres SEEDLINE ID no. ME06336 at SEQ ID NO. 441
MEMELSPLVSLTAPTSLLTLAIIFVVIFALRPKPKSSSDKELPPGSLGWPIVGETLEFLLGNPENFVFNRMRKYSPRIFKTKILGEETVVICGPEGHKFLFSNEQKLFTAFRLHSTQKLFRSYQSSSATSVQSSCDTDSKKILRSPGFLKPEALMRYLGKMDAITQQQMEKYWEKKDQVKAFPLAKTLTLTLACRFFLGIDEPERISRLVKSFDDITLGMHSIPLDFPGTAFYKANKAAAAIRRELKEVIKEKKAAMVTEVAMQDILCHMIVATDETGKYMAEAEIADKIMGLLVAGYSTVATAITFFMKYVGERPHIYAKILAEQLQVEGDKKAGEMLEWDDIQKMKYSWNVMYEVMRLTPPLQGTFREALTDFTYAGYTVPKGWKIYWTVSTTNKNPEYFPEPEKFDPSRYDEGNKLPPFTYVPFGGGPRMCPGKEYARLAILAFVHNVVKRFQWELVNPKEKIVGDMMPTPNNGLPIRLTLRH

SEQ ID NO: 487 - protein, 465 aa, Phaseolus vulgaris
  misc_feature: Public GI ID no.86129700
  misc_feature: Bit score of 164.6 for HMM based on sequences of FIGURE 7.
  misc_feature (359)..(429): Pfam Name: p450 Pfam Description: Cytochrome P450
  misc_feature: Functional Homolog Of Ceres SEEDLINE ID no. ME06336 at SEQ ID NO. 441
  misc_feature (242)..(242): Xaa is any aa, unknown, or other
MDLSAILLLGARGLFFFLFRRLIKSFRSFGSHFPLLPGTMVCPYFGETFQMYSQDPNVFFATKIKRYGSMFKSHILGYPCVMISNPEAAKFVLHKAQLFKPTFPASKQRMLGTQAIFFHQGAYHATLRKLVLRSFTTEAIKNVVSDIESIAQTCLKSWEGKFITTFLEMKTYTFNVALLSIFGKDETLNAEDLKRCYYTLERGYNSMPINLPGTLFHKAMKARKELAEILAQKISTRRKMKXRTHDLMGSFMNEKAGFTDEQIICYIIGCIFAARDTTASVLTWMVWYLGRNPSVLETATEEEKCILETKGGSGEDQGQKPNDTDKMPLSSRVFQYTKQFFSIPCLWFCVAVVDIISSGYLIPKGWKVLPLFRNIHHSPDNFKEPEKFDPSRFEVAPKPNTFMPFGNGVHSCPGNVLAKLEIFVLLHHITTKFWCSIMGANNGIQYGPFSLPQNGLPSTLYLKKQ

SEQ ID NO: 488 - DNA, 1667 bp, Arabidopsis thaliana
  misc_feature: Ceres CLONE ID no.11278
  misc_feature: Encodes the peptide sequence at SEQ ID NO. 489
aaccaaagactcttaaccatctcttctctctctctttgaaaacatagcacacacaaaaaaaaaacagagcaaaaagaaaaaacaaagatgggcataatgatgatgattttgggtcttcttgtgatcattgtttgtttatgtactgctcttctccgatggaaccagatgcgatattctaagaaaggtcttcctcctggaaccatgggctggccaatatttggtgaaaccactgagtttcttaaacaaggaccagatttcatgaaaaaccaaagactaagatatgggagtttcttcaagtctcacattcttggctgcccaacaatagtctcaatggacgcagagttaaacagatacattctaatgaatgaatcgaaaggacttgttgccggttacccgcaatctatgcttgatattctagggacatgcaacatagctgcggttcatggcccgagccaccggctaatgagaggctcgttgctttctttaataagcccaaccatgatgaaagaccatctcttgcctaagattgatgatttcatgagaaactatctttgcggttgggatgatcttgagacagttgatatccaagaaaagaccaaacatatggcatttttatcatcgttgttacaaatagctgagactttgaaaaaaccagaggttgaagaatatagaacagagtttttcaagcttgttgtgggaactctatcggtcccgatcgatatcccgggaacgaattaccgcagtggagtccaagcaagaaacaacatcgataggttattgacagaactgatgcaagaaagaaaagagtctggagaaactttcacagacatgttgggttacttgatgaagaaggaagataaccgatacttgttaaccgataaagagataagagatcaagtggtaacgatcttgtattccggttatgagactgtctctacaacctccatgatggctcttaagtatctccatgatcatccaaaagctcttgaagaactcagaagagaacatttggctataagggagagaaaacgacctgacgaaccgctcactctcgacgatattaaatcgatgaaattcactcgagctgtgatctttgagacatcaagattggcaacgattgttaatggtgtccttaggaaaactactcacgacttagaactcaacggttatttaatcccaaaaggttggagaatttacgtatacacaagagagattaactatgatacatctctttatgaagatccaatgatctttaacccatggagatggatggaaaagagcttagaatcaaagagctatttcttactctttggaggtggagttaggctttgccctggaaaggaactaggaatctcggaagtctcaagcttccttcactactttgttacaaaatatagatgggaagagaatggagaagacaaattaatggtctttccaagagtttctgcaccaaaaggataccatcttaagtgttcaccttactgactagttttgtcctaatattgaaaaatgtgtaaataaatctattaagggtcattttgtagggctaattaacctattttatctattaaatctctcaagatcatagaggagatggataatgtacagagagagagagagaagaagaaaatggaatatagaaaaaaataaaatatttgaaatgttgt

SEQ ID NO: 489 - protein, 465 aa, Arabidopsis thaliana
  misc_feature: Ceres CLONE ID no.11278
  misc_feature: Bit score of 365.4 for HMM based on sequences of FIGURE 7.
  misc_feature (212)..(462): Pfam Name: p450 Pfam Description: Cytochrome P450
  misc_feature: Functional Homolog Of Ceres SEEDLINE ID no. ME06336 at SEQ ID NO. 441
MGIMMMILGLLVIIVCLCTALLRWNQMRYSKKGLPPGTMGWPIFGETTEFLKQGPDFMKNQRLRYGSFFKSHILGCPTIVSMDAELNRYILMNESKGLVAGYPQSMLDILGTCNIAAVHGPSHRLMRGSLLSLISPTMMKDHLLPKIDDFMRNYLCGWDDLETVDIQEKTKHMAFLSSLLQIAETLKKPEVEEYRTEFFKLVVGTLSVPIDIPGTNYRSGVQARNNIDRLLTELMQERKESGETFTDMLGYLMKKEDNRYLLTDKEIRDQVVTILYSGYETVSTTSMMALKYLHDHPKALEELRREHLAIRERKRPDEPLTLDDIKSMKFTRAVIFETSRLATIVNGVLRKTTHDLELNGYLIPKGWRIYVYTREINYDTSLYEDPMIFNPWRWMEKSLESKSYFLLFGGGVRLCPGKELGISEVSSFLHYFVTKYRWEENGEDKLMVFPRVSAPKGYHLKCSPY

SEQ ID NO: 490 - protein, 506 aa, Oryza sativa subsp. japonica
  misc_feature: Public GI ID no.50253219
  misc_feature: Bit score of 429.6 for HMM based on sequences of FIGURE 7.
  misc_feature (224)..(406): Pfam Name: p450 Pfam Description: Cytochrome P450
  misc_feature: Functional Homolog Of Ceres SEEDLINE ID no. ME06336 at SEQ ID NO. 441
METLVCVAVWAVAMAMVVASVMWAYRWSHPRANGRLPPGSLGLPLLGETLQFFAPNTTCDISPFVKERLNRYGSIFKTSVVGRPVVVTADPEMNYYVFQQEGKLFESWYPDTFTEIFGRDNVGSLHGFMYKYLKSLVLRLYGQENLRAVLLDETDRACRTSLASWAAQPSVELKDSISAMIFDLTAKKLISYEPSKSSENLRKNFVAFIRGLISFPVDIPGTAYHECMKGRRNAMKVLKKMMRERMEEPGRQCEDFFDVLIEELGREKPVLTEGIALDLMFVLLFASFETTSLALTLGVRLLAENPTVLDALTEEHEAIVRGRKEGCDAAGLTWADYKSMTFTSQVTLEMVRLANIVPGIFRKALQDIEFKGYTIPAGWGVMVCPPAVHLNPEIYEDPLAFNPWRWQMQLTLVVLMLSGLSVGLIPKIYRVQQDKVEITGGSKHFMAFGGGLRFCVGTDLSKVLIATFIHHLVTKYRWKTVKGGNIVRTPGLSFPDGFHVQFFPKN

SEQ ID NO: 491 - protein, 506 aa, Oryza sativa subsp. indica
  misc_feature: Public GI ID no.125540653
  misc_feature: Bit score of 426.1 for HMM based on sequences of FIGURE 7.
  misc_feature (224)..(406): Pfam Name: p450 Pfam Description: Cytochrome P450
  misc_feature: Functional Homolog Of Ceres SEEDLINE ID no. ME06336 at SEQ ID NO. 441
METLVCVAVWAVAMAMVVASVMWAYRWSHPRANGRLPPGSLGLPLLGETLQFFAPNTTCDISPFVKERLNRYGSIFKTSVVGRPVVVTADPELNYYVFQQEGKLFESWYPDTFTEIFGRDNVGSLHGFMYKYLKSLVLRLYGQENLRAVLLDETDRACRASLASWAAQPSVELKDSISAMIFDLTAKKLISYEPSKSSENLRKNFVAFIRGLISFPVDIPGTAYHECMKGRRNAMKVLKKMMRERMEEPGRQCEDFFDVLIEELGREKPVLTEGIALDLMFVLLFASFETTSLALTLGVRLLAENPTVLDALTEEHEAIVRGRKEGCDAAGLTWAEYKSMTFTSQVTLEMVRLANIVPGIFRKALQDIEFKGYTIPAGWGVMVCPPAVHLNPEIYEDPLAFNPWRWQMQLTLVVLILSGLSVGLIPKIYRVQQDKVEITGGSKHFMAFGGGLRFCVGTDLSKVLIATFIHHLVTKYRWKTVKGGNIVRTPGLSFPDGFHVQFFPKN

SEQ ID NO: 492 - protein, 465 aa, Arabidopsis thaliana
  misc_feature: Public GI ID no.9294419
  misc_feature: Bit score of 361.3 for HMM based on sequences of FIGURE 7.
  misc_feature (212)..(462): Pfam Name: p450 Pfam Description: Cytochrome P450
  misc_feature: Functional Homolog Of Ceres SEEDLINE ID no. ME06336 at SEQ ID NO. 441
MGIMMMILGLLVIIVCLCTALLRWNQMRYSKKGLPPGTMGWPIFGETTEFLKQGPDFMKNQRLRYGSFFKSHILGCPTIVSMDAELNRYILMNESKGLVAGYPQSMLDILGTCNIAAVHGPSHRLMRGSLLSLISPTMMKDHLLPKIDDFMRNYLCGWDDLETVDIQEKTKHMAFLSSLLQIAETLKKPEVEEYRTEFFKLVVGTLSVPIDIPGTNYRSGFQARNNIDRLLTELMQERKESGETFTDMLGYLMKKEDNRYLLTDKEIRDQVVTILYSGYETVSTTSMMALKYLHDHPKALEELRREHLAIRERKRPDEPLTLDDIKSMKFTRAVIFETSRLATIVNGVLRKTTHDLELNGYLIPKGWRIYVYTREINYDTSLYEDPMIFNPWRWMEKSLESKSYFLLFGGGVRLCPGKELGISEVSSFLHYFVTKYRWEENGEDKLMVFPRVSAPKGYHLKCSPY

SEQ ID NO: 493 - protein, 468 aa, Arabidopsis thaliana
  misc_feature: Public GI ID no.18402179
  misc_feature: Bit score of 337.2 for HMM based on sequences of FIGURE 7.
  misc_feature (35)..(463): Pfam Name: p450 Pfam Description: Cytochrome P450
  misc_feature: Functional Homolog Of Ceres SEEDLINE ID no. ME06336 at SEQ ID NO. 441
MAEIWFLVVPILILCLLLVRVIVSKKKKNSRGKLPPGSMGWPYLGETLQLYSQNPNVFFTSKQKRYGEIFKTRILGYPCVMLASPEAARFVLVTHAHMFKPTYPRSKEKLIGPSALFFHQGDYHSHIRKLVQSSFYPETIRKLIPDIEHIALSSLQSWANMPIVSTYQEMKKFAFDVGILAIFGHLESSYKEILKHNYNIVDKGYNSFPMSLPGTSYHKALMARKQLKTIVSEIICERREKRALQTDFLGHLLNFKNEKGRVLTQEQIADNIIGVLFAAQDTTASCLTWILKYLHDDQKLLEAVKAEQKAIYEENSREKKPLTWRQTRNMPLTHKVIVESLRMASIISFTFREAVVDVEYKGYLIPKGWKVMPLFRNIHHNPKYFSNPEVFDPSRFEVNPKPNTFMPFGSGVHACPGNELAKLQILIFLHHLVSNFRWEVKGGEKGIQYSPFPIPQNGLPATFRRHSL

SEQ ID NO: 494 - protein, 440 aa, Solanum lycopersicum
  misc_feature: Public GI ID no.89146804
  misc_feature: Bit score of 334.0 for HMM based on sequences of FIGURE 7.
  misc_feature (211)..(429): Pfam Name: p450 Pfam Description: Cytochrome P450
  misc_feature: Functional Homolog Of Ceres SEEDLINE ID no. ME06336 at SEQ ID NO. 441
MAFFLIFLSSFFGLCIFCTALLRWNQVKYNQKNLPPGTMGWPLFGETTEFLKLGPSFMKNQRARYGSFFKSHILGCPTIVSMDSELNRYILVNEAKGLVPGYPQSMIDILGKCNIAAVNGSAHKYMRGALLSLISPTMIRDQLLPKIDEFMRSHLTNWDNKVIDIQEKTNKMAFLSSLKQIAGIESTSLAQEFMSEFFNLVLGTLSLPINLPNTNYHRGFQARKIIVNLLRTLIEERRASKEIQHDMLGYLMNEEATRFKLTDDEMIDLIITILYSGYETVSTTSMMAVKYLHDHPKVLEELRKEHMAIREKKKPEDPIDYNDYRSMRFTRAVILETSRLATIVNGVLRKTTQDMEINGYIIPKGWRIYVYTRELNYDPRLYPDPYSFNPWRWMDKSLEHQNSFLVFGGGTRQCPGKELGVAEISTFLHYFVTKYRNRWR

SEQ ID NO: 495 - DNA, 1711 bp, Gossypium hirsutum
  misc_feature: Ceres CLONE ID no.1941409
  misc_feature: Encodes the peptide sequence at SEQ ID NO. 496
attgctctcatcatcacaacaagatcccccctcaccattccattaatctcctttcattgctagctctcatcttttttagctatggagattgtttctattttactatacattatcctcttcctctccactcttctttcattattaaagaaacaaaagaatgggattcattttaaaaaattcaagcttccacctggttcaatgggttggccatacgttggtgaaactcttcaactctattctcaagacccaaatattttctttttaaccaaacaaaaaagatatggtgaaatattcaaaacccatatactgggttgcccttgtgtgatgttggccagccctgaggcggctaggttcgtgttggtgacacatgctcatttgttcaaaccgacgtacccgaagagcaaagagaggcttatcggtcctcacgcactgttctttcaccgaggcggataccatgctcggttgaggagattggtgcagaactcgttagcacctcaaactataaagaaattgatccctgatattcaaggcattgctgtttcgacactcgaatcatgggctgcttctggtcaagttgtaaacaccttttatgagatgaagaagttgtcattcgatgtcggcattttgtccatttttggtcacatagaaagagggttcagagagatgttggaggagaattaccggaaagtagacaaaggttacaattcctttccgacaaacattcctgggactgcttatcaacaagctatccttgcgaggaaaaggctgaaccggattttgggtgaaataataagctcaaggaaggagaaaaggctgttggagaaggacatgttgggccattttttaagcttcaaggatgaaaatgatcaaaaattgagcgatgagcagattgcagataacattattggagtactttttgcagcacaagacacaacagccagtgttataacatgggttcttaaattccttcatgatgatcccaaacttctagaagctgttaaggcagagcaaatggcaatatatgacgccaacaacggaggaaaaatgccattaacatgggaacaaacaagaagcatgcctcttacacatagggttgtaatggagagcttgaggatggcaagtattatatctttcacattcagggaagcagtagttgatgttgactacaaaggatacttaatacccaagggttggaaagtgatgccattattcaggaacattcatcataacccagaattttttcccaatcctcaagaattcgatccatctagatttgaggtagctccaaaagccaacaccttcatgccatttggaaacggcgttcatgcttgccccggcaatgaactggcgaagctggaggctctcattttgatccaccacctagtaacaaattttaggtgcgaggttgtgagttcaaaaagtggtattcaatatgggccattcccagtgcctcaacaaggactcccagccagattttggaaggaaccaaagcagttacaatcatgatgtttggtctttaattagtaattagttaactaatttggtaaaagagaatactattccatgctttcaccattgtaccaatagtccaaaccaatactttttatgctacctaatggaaccctattatttttcaccatggggtttctacaatcatgtatatattattacctttggctatggcacgtaataataagaaaaaaattaatgc

SEQ ID NO: 496 - protein, 474 aa, Gossypium hirsutum
  misc_feature: Ceres CLONE ID no.1941409
  misc_feature: Bit score of 329.1 for HMM based on sequences of FIGURE 7.
  misc_feature (36)..(465): Pfam Name: p450 Pfam Description: Cytochrome P450
  misc_feature: Functional Homolog Of Ceres SEEDLINE ID no. ME06336 at SEQ ID NO. 441
MEIVSILLYIILFLSTLLSLLKKQKNGIHFKKFKLPPGSMGWPYVGETLQLYSQDPNIFFLTKQKRYGEIFKTHILGCPCVMLASPEAARFVLVTHAHLFKPTYPKSKERLIGPHALFFHRGGYHARLRRLVQNSLAPQTIKKLIPDIQGIAVSTLESWAASGQVVNTFYEMKKLSFDVGILSIFGHIERGFREMLEENYRKVDKGYNSFPTNIPGTAYQQAILARKRLNRILGEIISSRKEKRLLEKDMLGHFLSFKDENDQKLSDEQIADNIIGVLFAAQDTTASVITWVLKFLHDDPKLLEAVKAEQMAIYDANNGGKMPLTWEQTRSMPLTHRVVMESLRMASIISFTFREAVVDVDYKGYLIPKGWKVMPLFRNIHHNPEFFPNPQEFDPSRFEVAPKANTFMPFGNGVHACPGNELAKLEALILIHHLVTNFRCEVVSSKSGIQYGPFPVPQQGLPARFWKEPKQLQS

SEQ ID NO: 497 - DNA, 1877 bp, Glycine max
  misc_feature: Ceres CLONE ID no.512411
  misc_feature: Encodes the peptide sequence at SEQ ID NO. 498
acacacaccctcttctccttcttcttcttctttgtgttatccttcacacacctattacaagtcaagccactcaactcacactaacataaaaacatggaactaagcaccatgtttttcctgtgtgcttctcttctcttcattgttctcttcttcaggacactcatcaaaccttactatgtctccaaacgccgtgacttgccactcccacctggctccatgggttggccttacataggagaaacctttcaaatgtattctcaagacccaaatgtcttctttgcctcaaaaataaaaaggtttggctctatgtttaagtcccacattctaggttgtccctgcgtgatgatttccagccccgaggctgccaagtttgtgctgaacaaagctcaactcttcaagccaacattcccagcaagcaaagagaggatgttgggaaaacaagctatcttctttcaccaaggagagtaccatgctaacttgagaaggcttgttcttcgcaccttcatgccagaagccatcaaaaacatcgtaccggacattgaatccattgcccaagattgcttaaagtcttgggaaggccgtttgatcaccactttccttgaaatgaaaacgttcaccttcaacgttgctctgctttcaattttcggaaaagaagagattctgtacagagatgctctgaaacggtgctactacactctggagcaagggtataactcaatgccaattaacgttccgggaacactgttccacaaggcgatgaaggcaaggaaggagcttgcacaaatcgtggcccaaataatctggagcaggaggcagaggaagatgattgattacaaggacttgttgggttcattcatggatgagaaatcagggctcaccgacgaccagatagcggataatgttattggcgtcattttcgcagctcgtgacaccaccgccagtgtgctgacgtggatcgtcaagtacctcggtgaaaaccccagtgtcctagaagctgttaatgaggagcaagagtgcatattgaagagcaaggaagaaaggggagaagataagggtctaaattgggaagatgccaaaaagatgccaataacttcaagggtcattcaggagactctaagagttgcttcaattttgtcttttactttcagagaagcagtagaggatgtagaatatcaagggtatcttattccaaaagggtggaaagtgctacctctatttaggaacatacaccacagtccagacaacttcaaggagccagaaaaatttgatccctcaagatttgaggctgctccaaaacccaacacttttatgccatttggcagtgggatccacatgtgtccagggaacgaattagccaagttggagattttggtcctcctacatcatctgaccacaaagtacaggtggtctgttgtgggtgcaaagaatgggattcaatacggcccttttgctcttccccaaaacggcttacccatcacattatttcccaagaacaagtagatatcactcaaacaatggcttcatagtagctttctaaatatggaaagaattgcttcatagctctcaaaattggtttccatattgcaattggataaccaaacaagggagatcaacttttcccttctttttggccaagagaaacccaaaggggtagtcttgacaatagcatacaaacaggaagaatgtcaagtgtatatagaggaggaggtttcacagcctgagcaaatagtattaagttcttttcattttcttattttttttatccttcaaatgtgaagaaaagtcctcataagattgtattgatgcattcaactaattagttctgtatccataagaatgccgcaaggccaaaataaaagttaaattttggttctgag

SEQ ID NO: 498 - protein, 463 aa, Glycine max
  misc_feature: Ceres CLONE ID no.512411
  misc_feature: Bit score of 335.7 for HMM based on sequences of FIGURE 7.
  misc_feature (33)..(458): Pfam Name: p450 Pfam Description: Cytochrome P450
  misc_feature: Functional Homolog Of Ceres SEEDLINE ID no. ME06336 at SEQ ID NO. 441
MFFLCASLLFIVLFFRTLIKPYYVSKRRDLPLPPGSMGWPYIGETFQMYSQDPNVFFASKIKRFGSMFKSHILGCPCVMISSPEAAKFVLNKAQLFKPTFPASKERMLGKQAIFFHQGEYHANLRRLVLRTFMPEAIKNIVPDIESIAQDCLKSWEGRLITTFLEMKTFTFNVALLSIFGKEEILYRDALKRCYYTLEQGYNSMPINVPGTLFHKAMKARKELAQIVAQIIWSRRQRKMIDYKDLLGSFMDEKSGLTDDQIADNVIGVIFAARDTTASVLTWIVKYLGENPSVLEAVNEEQECILKSKEERGEDKGLNWEDAKKMPITSRVIQETLRVASILSFTFREAVEDVEYQGYLIPKGWKVLPLFRNIHHSPDNFKEPEKFDPSRFEAAPKPNTFMPFGSGIHMCPGNELAKLEILVLLHHLTTKYRWSVVGAKNGIQYGPFALPQNGLPITLFPKNK

SEQ ID NO: 499 - DNA, 1808 bp, Gossypium hirsutum
  misc_feature: Ceres CLONE ID no.1883912
  misc_feature: Encodes the peptide sequence at SEQ ID NO. 500
acacaacttcttcaccattcagctaccaaaccaagatttccaccctatttataatttattaaacatggcattctatttcatgattcccttatttgcttccattttctttatttttctcttcaattttctgcttaatttgttcaaatccaaaaaatcccgggacttacccctcccgcctggcaccctgggttggccgtacatcggtgaaacctttcagctctactcccaaaacccaaatgtcttctttgcttccaagcagaaaaggtacggctccatattcaagacccatatacttgggtgtccctgtgtgatgatttccagcccggaagctgcgaaattcgtgcttgtcaccaagtctcacctcttcaagccaacgtttccggccagtaaagagaggatgttgggcaaacaagccattttctttagccaaggacagtaccatgccaaattgaggaagcttgtgctccgtgccttcgtgcctgaggccgtcaaaagcttcgtttctaacatcgaatccattgccaaagattctctccagtcattggaaggcaggctgattaccactttccaagaaatgaaaacgtacacattcaatgttgcgctgctatcgatattcggagaggatgaagtgaagtacagagaagatctgaagaggtgttattacatattagaaaaagggtataactcgatgcccattaatattccgggtacacttttcaacaaatcgatgaaagcaaggaaagagctagctcagatcctggccaaaatcatatcgaccaggagggaaacgaagcaggagtacaatgacttgttgggttctttcatgggtgataaagaaggcctcaccgatgaacaaatcgctgataacatcattggtgtaatctttgctgctcgtgacaccaccgctagtgtactcacttggataattaagtaccttggagaaaaccccagcgttcttcaagctgtcacggatgaacaagaggccatagtgaaaggtaaagagaaatgcggtgaggagcaaactctgagctgggcagataccaagaagatgcccataacttcaagagtgattcaggagacacttagggttgcttcgattttatcttttaccttcagagaagcagtggctgatgttgaatatgaagggtatcttataccaaaaggatggaaagttttaccactttttagaaacattcatcacagcccagaaatcttcccagatcctgaaaagtttgatccttcgagatttgaggttgttccaaaacccaatacatttatgccatttggcaatggaacacattcatgtccagggaatgagttagccaagctggaaatcatggtccttctccatcatctgaccacaaagtacaggtggtctatggtgggtacaaacagtggaattcagtatggtccttttgctcttccccagaatggtttgcccatcagattaatcagaaaatcataggcatgcactcaatttcttaattttagagtatgaagcaaagaatgcaaaggcaaagacagttccaacaaagagctttttggacaaatgaagaaacttgagatcataaataacaaaaatggaaagaaaaaaaaccaagtccccaaactgtacagaaaagaaaagcaaaatctgcaaacagtttcctgtttattctttcttactgtttattctttctttctccaactcatagcaaagaataacaaaaaatggaaaaggagtgtcttttgtaagctttcttaatttaaatgaagtccgcaaggcaaaaaaaaaaattcatatttatatgaattattgaaaattttac

SEQ ID NO: 500 - protein, 466 aa, Gossypium hirsutum
  misc_feature: Ceres CLONE ID no.1883912
  misc_feature: Bit score of 340.0 for HMM based on sequences of FIGURE 7.
  misc_feature (37)..(464): Pfam Name: p450 Pfam Description: Cytochrome P450
  misc_feature: Functional Homolog Of Ceres SEEDLINE ID no. ME06336 at SEQ ID NO. 441
MAFYFMIPLFASIFFIFLFNFLLNLFKSKKSRDLPLPPGTLGWPYIGETFQLYSQNPNVFFASKQKRYGSIFKTHILGCPCVMISSPEAAKFVLVTKSHLFKPTFPASKERMLGKQAIFFSQGQYHAKLRKLVLRAFVPEAVKSFVSNIESIAKDSLQSLEGRLITTFQEMKTYTFNVALLSIFGEDEVKYREDLKRCYYILEKGYNSMPINIPGTLFNKSMKARKELAQILAKIISTRRETKQEYNDLLGSFMGDKEGLTDEQIADNIIGVIFAARDTTASVLTWIIKYLGENPSVLQAVTDEQEAIVKGKEKCGEEQTLSWADTKKMPITSRVIQETLRVASILSFTFREAVADVEYEGYLIPKGWKVLPLFRNIHHSPEIFPDPEKFDPSRFEVVPKPNTFMPFGNGTHSCPGNELAKLEIMVLLHHLTTKYRWSMVGTNSGIQYGPFALPQNGLPIRLIRKS

SEQ ID NO: 501 - DNA, 1893 bp, Glycine max
  misc_feature: Ceres CLONE ID no.1236416
  misc_feature: Encodes the peptide sequence at SEQ ID NO. 502
attcattgacttgaaaagccatcgaagcaaattaaaacgcattccacacctatcatcacatttcgtcatattatttccacataacccgcactcgcgggaactcacatagagagagaagttagttgctacctacgccttgtgtgtgtgtgtgtgtttatggagatcattgccaccattttcttttgcattttactcatcttctcatcccttattctttcgtatccattaataaagaaacacaagaaacaacaacacgtagtagctaagcctaagcttccccctggctcaatgggctggccttacataggagagacccttcaactctattctcaagaccctaacatcttctttgcttcaaagcaaaaaagatatggagaaattttcaagacacacatactaggttgtccatgcgtgatgttggctagccctgaggctgcacgttttgtgttggtgactcatgctcacttgttcaaacccacatacccaaaaagcaaagagaagctaataggcacttcagcattgttcttccaccaaggagaataccacactcgtatcaggaagctggtgcaaacctctctctctcctgaaaccatccgaaaactgatcccagacatcgaaaccgaggtcgtttcctctttggaatcgtgggtttccactggacaagtcatcaacgctttccaagaaatgaaaaagttctctttcaatattggcatcctctctgtctttggtcacttggaagacaattatagagaccagcttaaggaaaactactgcatagtggagaaagggtacaattctttccctaacaggattcccggaactgtatactccaaagcactcttggcaaggaggagaatcagggagattataagtgagatcatttgtaaaagaaaggagcagagattgatggagatggatctattaggccacttgctgaactacaaggatgaaaaagaacaaacgctaagtgatgaccaaattgctgataatgtaattggggtactatttgcagctcaggatactacagcaagtgttctaacctggattctcaagtatcttcatgatgaccagaaacttcttgaagcaataaaagcagaccaaatggcagtatatgaagctaatgaaggagggaaaaagccattgacatggggtcagaccagaaatatgccaactactcatagggtgattttggaaagccttagaatgtcaagtatcatatcatttacttttagggaagctgtggttgatgtagtatacaaaggatatcttataccgaagggttggaaagtcatgccactgttcaggaacatccatcataatccagaatttcacccttctcctcacaattttgacccatcaaggtttgaggttgctccaaagcccaatacttttacaccatttggcaacggagtgcactcttgtccaggaaatgagcttgccaaactgaacatgttcattttaattcatcatctagtaaccaaatataggtgggaagtagtgggatatcagaacggaatccaacatagcccattcccagtccctctgcatggtctacctacaagattttggagaaacgaatagaatcaaagatgatcatcatatgataaaatctccctttattcatatataaaatttagatattccttgccaccccaccccaacttgatattgattgttcctccttaacccatcccatggccaattctcctgttttaaaagtgaggatccaaaaaaattgtcttattagcttcttccaagtaacatcatgtgtattatcctatttgtaagtaaatggtggcagtggcatatatagcttagtgccattaattagtctgagcgtgcatgtaagctgtactaataataataaatgttatcaactaatgattttagttt

SEQ ID NO: 502 - protein, 474 aa, Glycine max
  misc_feature: Ceres CLONE ID no.1236416
  misc_feature: Bit score of 320.7 for HMM based on sequences of FIGURE 7.
  misc_feature (41)..(447): Pfam Name: p450 Pfam Description: Cytochrome P450
  misc_feature: Functional Homolog Of Ceres SEEDLINE ID no. ME06336 at SEQ ID NO. 441
MEIIATIFFCILLIFSSLILSYPLIKKHKKQQHVVAKPKLPPGSMGWPYIGETLQLYSQDPNIFFASKQKRYGEIFKTHILGCPCVMLASPEAARFVLVTHAHLFKPTYPKSKEKLIGTSALFFHQGEYHTRIRKLVQTSLSPETIRKLIPDIETEVVSSLESWVSTGQVINAFQEMKKFSFNIGILSVFGHLEDNYRDQLKENYCIVEKGYNSFPNRIPGTVYSKALLARRRIREIISEIICKRKEQRLMEMDLLGHLLNYKDEKEQTLSDDQIADNVIGVLFAAQDTTASVLTWILKYLHDDQKLLEAIKADQMAVYEANEGGKKPLTWGQTRNMPTTHRVILESLRMSSIISFTFREAVVDVVYKGYLIPKGWKVMPLFRNIHHNPEFHPSPHNFDPSRFEVAPKPNTFTPFGNGVHSCPGNELAKLNMFILIHHLVTKYRWEVVGYQNGIQHSPFPVPLHGLPTRFWRNE

SEQ ID NO: 503 - protein, 464 aa, Phaseolus vulgaris
  misc_feature: Public GI ID no.86129698
  misc_feature: Bit score of 332.7 for HMM based on sequences of FIGURE 7.
  misc_feature (36)..(460): Pfam Name: p450 Pfam Description: Cytochrome P450
  misc_feature: Functional Homolog Of Ceres SEEDLINE ID no. ME06336 at SEQ ID NO. 441
MELSTILCLGASFLFIFLFRTLIKQFLSKRPHFPLPPGTMGWPYIGETFQMYSQDPNVFFASKIKRYGSMFKSHILGCPCVMISSPEAAKFVLNKAQLFKPTFPASKERMLGKQAIFFHQGEYHANLRRLVLRTFMPEAIKNIVPDIESIAQDSLKSWEGRLITTFLEMKTFTFNVALLSIFGKEEILYRDALKRCYYTLEQGYNSMPINVPGTLFHKAMKARKELAQIVAQIISSRRQRKQDYKDLLGSFMGEKAGLTDEQIADNVIGVIFAARDTTASVLTWIVKYLGENPSVLEAVTEEQECILKTKEESGEDKGLNWEDTKKMPITSRVIQETLRVASILSFTFREAVEDVEYQGYLIPKGWKVLPLFRNIHHSPDNFKEPEKFDPSRFEAAPKPNTFMPFGSGIHSCPGNELAKLEILVLLHHLTTKFRWSVVGAKNGIQYGPFSLPQNGLPITLYPKK

SEQ ID NO: 504 - protein, 500 aa, Oryza sativa subsp. indica
  misc_feature: Public GI ID no.125563993
  misc_feature: Bit score of 328.1 for HMM based on sequences of FIGURE 7.
  misc_feature (45)..(474): Pfam Name: p450 Pfam Description: Cytochrome P450
  misc_feature: Functional Homolog Of Ceres SEEDLINE ID no. ME06336 at SEQ ID NO. 441
MAASFVIVIVISFFISLAFMCYVHYTSRQRRKLHGYGHEKAVRLPPGSMGWPYIGETLQLYSQDPNVFFASKQKRYGEIFKTHILGCPCVMLASPEAARFVLVTQAHLFKPTYPRSKERMIGPSALFFNQGDYHLRLRKLVQGPLGPDALRALVPDVEAAVRSTLASWDGNVSSTFHAMKRLSFDVGIVTIFGGRLDERRKAELRQNYAIVEKGYNSFPNSFPGTLYYKAIQARRRLHGVLSDIMRERRARGEPGSDLLGCLMQSRAGDDGALLTDEQVADNIIGVLFAAQDTTASVLTWIVKYLHDHPKLLEAVRAEQAAIRAANDGGRLPLTWAQTRSMALTHKVILESLRMASIISFTFREAVADVEYKGFLIPKGWKVMPLFRNIHHNPDYFQDPQKFDPSRFKVSPRPNTFMPFGNGVHACPGNELAKLEMLVLIHHLVTGYRWEIVGSSDEVEYSPFPVPKHGLLAKLWRDDTVSVETDGCQNGDNDDNGVAMV

SEQ ID NO: 505 - protein, 475 aa, Solanum tuberosum
  misc_feature: Public GI ID no.76803521
  misc_feature: Bit score of 342.5 for HMM based on sequences of FIGURE 7.
  misc_feature (41)..(470): Pfam Name: p450 Pfam Description: Cytochrome P450
  misc_feature: Functional Homolog Of Ceres SEEDLINE ID no. ME06336 at SEQ ID NO. 441
MVNYFEIFFYISIFLLGILSYYFCFSKKYNSSSKKNAYKLPPGSMGWPYIGETLQLYSQDPNAFFINRQRRFGEIFKTKILGCPCVMLASPEAARFVLVNQANLFKPTYPKSKENLIGQSALFFHQGDYHNHLRKLVQASLNPESIRNQIPYIEELSISALNSWVGGHVVNTYHEMKKFSFEVGILAIFGHLDGHVKEELKKNYSIVDKGYNSFPINLPGSLYRKSLQARKRLGKILSEIIRERKEKKVLEKGLLSCFLNAKEEKGLLVLNEDQIADNIIGVLFAAQDTTASVLTWILKYLHDNPKLLECVKAEQKVILQSNEQENHGLTWTQTRKMPITNKVVLETLRMASIISFAFREAVADVEYKGYLIPKGWKVMPLFRNIHHNPEFFPDPQKFDPSRFENAPKPNTFMPFGSGVHACPGNELAKLEILIMTHHLVTKFRWEVVGSGSGIQYGPFPVPLGGLAARFWKEST

SEQ ID NO: 506 - protein, 496 aa, Cucurbita maxima
  misc_feature: Public GI ID no.11934677
  misc_feature: Bit score of 310.5 for HMM based on sequences of FIGURE 7.
  misc_feature (48)..(488): Pfam Name: p450 Pfam Description: Cytochrome P450
  misc_feature: Functional Homolog Of Ceres SEEDLINE ID no. ME06336 at SEQ ID NO. 441
MESTWAVAAVVTAVVAVATVFSVLKWAAKSLNEWIYEAKLGDRRLALPPGDLGWPLIGNMLGFLRAFKSKNPETFIDGYVSRYGKTGVYKVHLFGNPSVVVTTPETCRKVLTDDEAFQPGWPRAAVELIGEKSFIQMPQEEHKRLRRLTSAPVNGFEALSNYIPYIEKNVLESLEKWSKMGPIEFLTQLRKLTFTVIMYIFLSSESEPVMEMLEKEYTRLNYGVRDMRINLPGFAYHKALKARKNLVAALKGIVTERRRQKLDKWAPKRKDMMDQLIDIVDENGRKLDDEEIIDILIMYLNAGHESSGHTMMWATILLNQHPEVLKKAREEQEAIVRNRPAGQTGLTLKECRDMEYLSKVVDETLRYVSFSLVVFREAQMDVNLNGYLIPKGWKVLAWFRSIHYDSEVYPDPKKFEPSRWDGFVPKAGEFLPFGAGSRLCPGNDLAKLEICIFVHYFLLNYNLEWLTPDCEILYLPHSRPKDNCMAKITKKSSVAA

SEQ ID NO: 507 - protein, 493 aa, Picea sitchensis
  misc_feature: Public GI ID no.59800274
  misc_feature: Bit score of 314.1 for HMM based on sequences of FIGURE 7.
  misc_feature (52)..(491): Pfam Name: p450 Pfam Description: Cytochrome P450
  misc_feature: Functional Homolog Of Ceres SEEDLINE ID no. ME06336 at SEQ ID NO. 441
MVWKEAVSVLQKAQELKEPPLMFTVFLASFIGLAFFFYLISNHRTKAWRGIPPGTFGWPLIGETLEFLGCQRKGNPRDFFDSRTQKYGNVFTTSLVGHPTVVFCSPEGNRFLFSNENKLVVNSWPSSVGNLFRSSLITTVGDDAKRLRRILMTFLRPEALREFVGRVDSMTKRHLAEHWIGKDEVMALPLLKRYTFSLACDLFASINTKDDLDRLWLHFMVFVKGVMQIPIDLPGTRYNKTKHAANAIRQQLGSIINERKIALEAGNASPEQDLLSFLLSNVDEQGESLTDNEIQDNILLLLYAGHDTSSSTLTVLLKFLAENPHCYEEVLREQLNIAGSKEEGQLLEWEDLQRMKYSWRVAQEALRLFPAVQGSFRKAIKEFIYDGFTIPKGWKLHWTVNSTHQKSEYFSNPEKFDPSRFEGEGPPPYTFVPFGGGPRMCPGNEFARMEILIFLHNIVKNFNWNLVNPLEKVIVDPMPAPVNGLPIKLVPHD

SEQ ID NO: 508 - protein, 482 aa, Medicago truncatula
  misc_feature: Public GI ID no.92887507
  misc_feature: Bit score of 315.2 for HMM based on sequences of FIGURE 7.
  misc_feature (36)..(464): Pfam Name: p450 Pfam Description: Cytochrome P450
  misc_feature: Functional Homolog Of Ceres SEEDLINE ID no. ME06336 at SEQ ID NO. 441
MDSTLAYIIVLFLLTLFSFKFFPKRPKTKQTSAKLPPGSMGWPYIGQTLQLYSQDPNVFFFSKQKRYGEIFKTNILGCKCVMLASPEAARFVLVTQSHLFKPTYPKSKERLIGPCALFFHQGEYHLRLRKLIQRSLSLDSLRNLVPEIEALAVSTIKSWGDDGCMINTFKEMKKFSFEVGILKVFGNLEPRLREELKKNYWIVDNGYNSFPTQIPGTQYKKALLAREKLGSILKEIISERKEKKLLESERDLLSCLLNWKGEGGEILSDDEIGDNIIGVLFAAQDTTATVMTWVIKYLHDQPKLLECVKAEQKAIHMENDGKLQLNWNQTRNMPITYKVVLESMRMASVISFPFREAVADVEYKGFLIPKGWKAMPLFRNIHHNPEFFPEPHKFNPSRFEVSPKPNTFLPFGSGVHACPGNELAKLETLIMIHHLVTKFRLEVVGSQCGIQYGPFPLPLNGLPARCWRESTSIARKRFIGQK

SEQ ID NO: 509 - protein, 497 aa, Picea sitchensis
  misc_feature: Public GI ID no.59800276
  misc_feature: Bit score of 308.8 for HMM based on sequences of FIGURE 7.
  misc_feature (52)..(491): Pfam Name: p450 Pfam Description: Cytochrome P450
  misc_feature: Functional Homolog Of Ceres SEEDLINE ID no. ME06336 at SEQ ID NO. 441
MVWKEAVSVLQKAQELKEPPLMFTVFLASFIGLAFFFYLISNHRTKAWRGIPPGTFGWPLIGETLEFLGCQRKGNPRDFFDSRTQKYGNVFTTSLVGHPTVVFCSPEGNRFLFSNENKLVVNSWPSSVGNLFRSSLITTVGDDAKRLRRILMTFLRPEALREFVGRVDSMTKRHLAEHWIGKDEVTALPLLKRYTFSLACDLFASINNKDDLGRLWLHFMVFVKGVMQIPIDLPGTRYNKAKHAANAIRQQLGSIINERKIGLEAGNASPEQDLLSFLLSNVDEQGESLTDNEIQDNILLLLYAGHDTSSSTLTVLLKFLAENPHCYEEVLREQLDIAGSKEAGQLLEWEDLQRMKYSWRVAQEALRLFPAAQGSFRKAIKEFIYDGFTIPKGWKMYWTVNSTHRKSEYFSNPETFDPSRFEGEGPPPYTFVPFGGGPRMCPGNEFARLEILVFLHNIVKNCKWNLVNPGEKVIVDPMPAPVNGLPIKLVPHDSVYI

SEQ ID NO: 510 - DNA, 1779 bp, Glycine max
  misc_feature: Ceres CLONE ID no.598111
  misc_feature: Encodes the peptide sequence at SEQ ID NO. 511
aaatgagcagagctaaaaaatatgctgcaattcttatttttattttcattttttgttttttaagaaaaaaggctaaccttctgactttccaaagaactgagtctagtaatacaccaatggatggaattttcgcttacaccattctcattttgcttaccatattttcatttatgttcttaccaaaaccaaacagaagaagacctcagaaccagacacttgcaaagctccctccaggctcaatggggtggccgtacataggagaaacccttcaactctattcccaagacccaaatgcctacttttccaccaaacataaaaggtatggcgaaatattcaagaccaacatcttgggttgcccctgtgtgatgctgacaagccctgaggctgcacgctttgtgctagtgactcaagctcacttgttcagaccaacatacccgaaaagcaaggagcgtttgattggtccttttgctctgtttttccaccaaggtgaataccacacacgtttgaggaagcttgttcagaggtcactgtctctagaagcacttcgcaacttggtgcctcatattgaagccttagccttatctgccatgaactcttggggtggtgatggccaagtcattaacacatttaaggaaatgaaaatgttttcttttgaagttggaatcctcacaatttttggctatctagagccgcgtttgagggaggagctgaagaagaattaccggattgtggacaatggttacaattcctttccaacgtgcatcccgggaacacaataccaaaaggcactattggctagaaggagacttggcaagattataggtgacataatttgtgagaggaaggagaagaagttgcttgaaagggatctattgagctgcttattgaattggaaaggtgaagggggagaagtgttatctgattaccaaattgcagataacattattggggtgctttttgctgctcaggacaccacagctagtgccatgacatgggttgtaaagtacctgcatgatgaacccaaacttctggagtctgtaaaggctgagcagaaggcaattcacaagtctaatgaaggtaacctaccactgagttgggatcagactagaaacatgcgaattactcacaaggttgtgttagagagtttgagaatggcaagcatcatatcattccctttcagagaagcaatagctgatgtggaatacaagggattcctaataccaaaagggtggaaagcgatgcctctgttcagaaatattcaccacaatccagaatattttccagagcctcagaagttcaacccttcaaggtttgaggtcgcaccaaagcccaatactttcatgccatttggtagtggagtacatgcctgccccggcaatgagcttgctaagctggagacactgattatgatccatcatttggtcaccaagtttcggtgggaagtggtaggatccaagtgtgggattcaatatggcccattccccttgccactgaatggactcccagctagatgttggagagaatctaccagctagaaaagcagcatgggaagaaaacgcatgatatcatatagctgagaagcaatccactttccaaagtcacaaaaaaataattatctttttcttttctatgttgactctgtaatttttactttttatttttccatggtgggggcacttcaatatttacccctctatccttaatccttttctacccctgaaagaaagaagcaacaggggtgtggtgctttatttttcacttcaatcattagtttcaatt

SEQ ID NO: 511 - protein, 510 aa, Glycine max
  misc_feature: Ceres CLONE ID no.598111
  misc_feature: Bit score of 329.2 for HMM based on sequences of FIGURE 7.
  misc_feature (76)..(502): Pfam Name: p450 Pfam Description: Cytochrome P450
  misc_feature: Functional Homolog Of Ceres SEEDLINE ID no. ME06336 at SEQ ID NO. 441
MSRAKKYAAILIFIFIFCFLRKKANLLTFQRTESSNTPMDGIFAYTILILLTIFSFMFLPKPNRRRPQNQTLAKLPPGSMGWPYIGETLQLYSQDPNAYFSTKHKRYGEIFKTNILGCPCVMLTSPEAARFVLVTQAHLFRPTYPKSKERLIGPFALFFHQGEYHTRLRKLVQRSLSLEALRNLVPHIEALALSAMNSWGGDGQVINTFKEMKMFSFEVGILTIFGYLEPRLREELKKNYRIVDNGYNSFPTCIPGTQYQKALLARRRLGKIIGDIICERKEKKLLERDLLSCLLNWKGEGGEVLSDYQIADNIIGVLFAAQDTTASAMTWVVKYLHDEPKLLESVKAEQKAIHKSNEGNLPLSWDQTRNMRITHKVVLESLRMASIISFPFREAIADVEYKGFLIPKGWKAMPLFRNIHHNPEYFPEPQKFNPSRFEVAPKPNTFMPFGSGVHACPGNELAKLETLIMIHHLVTKFRWEVVGSKCGIQYGPFPLPLNGLPARCWRESTS

SEQ ID NO: 512 - protein, 478 aa, Nicotiana tabacum
  misc_feature: Public GI ID no.71081902
  misc_feature: Bit score of 338.7 for HMM based on sequences of FIGURE 7.
  misc_feature (42)..(470): Pfam Name: p450 Pfam Description: Cytochrome P450
  misc_feature: Functional Homolog Of Ceres SEEDLINE ID no. ME06336 at SEQ ID NO. 441
MTNFDLFFYISIFLLTILFLYLWFVITRNKKSSPQRKAYKLPPGSMGWPYIGETLQLYSQDPNIFFINRQRRYGEIFKTKILGCPCVMLTSPEAARFVLVNQANLFKPTYPKSKETLIGQSALFFHQGNYHIHVRKLVQTSLNPEAIHNQIPHIEELAISALNSWAGGHVVNTYHEMKKYSFEVGILAIFGHLDAHLKDQLKKNYIIVDKGYNSFPTNLPGSPYRKSLQARKRLGKILSEIINERKEKKLIEKGLLNCFLNAKDEKGLVLNEDQIADNIIGVLFAAQDTTASVLTWILKYLHDNPKLLKNVKAEQKAICQSNEQENHGLTWTQTRKMPITNKVVLETLRLASIISFTFREAVADVEYKGYLIPKGWKVMPLFRNIHQNPEFFPNPQNFDPSRFENVQKPNTFMPFDSGVHACPGNELAKLEMLIMTHHLVTKFRWEAEGSNSGIQYGPFPVPMGGLPARFWKESTTST

SEQ ID NO: 513 - protein, 496 aa, Phaseolus vulgaris
  misc_feature: Public GI ID no.38194919
  misc_feature: Bit score of 357.4 for HMM based on sequences of FIGURE 7.
  misc_feature (211)..(394): Pfam Name: p450 Pfam Description: Cytochrome P450
  misc_feature: Functional Homolog Of Ceres SEEDLINE ID no. ME06336 at SEQ ID NO. 441
MALFMAILGVLVLLLCFCSALLKWNEVRFRRKGLPPGAMGWPVFGETTEFLKQGPNFMKNKRARYGSFFKSHILGCPTIVSMDPELNRFILMNEAKGLVPGYPQSMLDILGTRNIAAVHGSTHKYMRGALLSIISPTLIRDQLLPKIDEFMRTHLMDWDNKVINIQEKTKEMAFLSSLKQIAGMESSSIAQPFMTEFFKLVLGTLSLPINLPRTNYRGGLQARKSIISILSQLLEERKASQDVHVDMLGCLMKKDENRYKLSDEEIIDLVITIMYSGYETVSTTSMMAVKYLHDHPKVLEEIRKEHFAIRERKKPEDPIDCNDLKSMRFTRAVIFETSRLATIVNGVLRKTTHDMELNGYLIPKGWRIYVYTREINYDPFLYHDPLTFNPWRWLVCNTTYTFFHFNMKPRKVESRIINEKLQMQGNSLESQSHFLIFGGGTRQCPGKELGIAEISTFLHYFVTRYRWEEVGGDKLMKFPRVVAPNGLHIRVSSFSN

SEQ ID NO: 514 - protein, 506 aa, Hordeum vulgare subsp. vulgare
  misc_feature: Public GI ID no.81362336
  misc_feature: Bit score of 323.4 for HMM based on sequences of FIGURE 7.
  misc_feature (43)..(455): Pfam Name: p450 Pfam Description: Cytochrome P450
  misc_feature: Functional Homolog Of Ceres SEEDLINE ID no. ME06336 at SEQ ID NO. 441
MAFFLLLCILVSVAIVSYAHHAIRRRRQGCAHGRHEQAALKLPPGSMGLPYVGETLQLYSQDPSVFLSSKQKRYGEIFKTHLLGCPCVMLASPEAARFVLVSRAHLFKPTYPRSKERLIGPSALFFHQGDYHLRLRRLVQGPLGPEALRKLVPDIEAAVRSTLAAWADGDVASTFHAMKRLSFDVGIVTIFGGRLDERRKEELRRNYAVVEKGYNSFPNSFPGTLYYKAIQARRRLNGVLSDVVHERRERGEHGDDLLGCLMRSRAGGDDADDEGALLTDEQVADNVIGVLFAAQDTTASVLTWIVKYLHDRPKLLEAVRAEHAAIHEANDGGRRPLTWAQTRSMTLTHRVILESLRMASIISFTFREAVADVEYKGFLIPKGWKVMPLFRNIHHSPDYFQDPHKFDPSRFKVAPRPNTFTPFGSGVHACPGNELAKLEMLVLIHHLVTGYRWEVVGSSDDVEYSPFPVPRHGLLARVRRDDGVCAGRKGCPTDEDDNYDDDEVIV

SEQ ID NO: 515 - DNA, 1673 bp, Triticum aestivum
  misc_feature: Ceres CLONE ID no.703821
  misc_feature: Encodes the peptide sequence at SEQ ID NO. 516
caaagaccacacgaggcgctaggccgctagcaaagctctcggccaaacaggcatcacgcgtgctgtagcaccaccggttggttcgttcgccggcgacggcaccgcggtgatcagcgatgggggagttggcgtgggcggcgctggcggggcttctggtgccgctggccgcggtggcgctggacgccgcggtgcgggcggcgcacgcgtggtactggacggcgtcgctgggcgccgggcggcgcggcaggctgccgccgggagacatggggtggccgctcgtcggcggcatgtgggccttcctctgcgccttcaagtccggcaggccggactccttcatcgactccttcgcccgacggttcgggcgggcggggctgtacagggcgttcatgttcagcagcccgacgatcatggtgacgacgccggacgcgtgcaagcaggtgctcatggacgacgacacgttcgtcaccggctggcccaaggccacggtggcgctcatcgggcccaagtccttcatcaacatgggctacgacgagcaccgccggctgcgcaagctcacggcggcgcccatcaacggcttcgacgcgctcacctcctacctgggcttcatcgaccacaccgtggtgaccacgctccggggctggtcggaccggggctccgacttcgagttcctcacggagctgcgccggatgacgttccggatcatcgtgcagatcttcatgggcggcgccgacgagcgcacggcggccgagctggagagcacctacacggagctcaactacggcatgcgcgccatggccatcgacctaccagggttcgcctaccacaaggccatccgcgcgcgccgcaggctcgtggcggcgctgcagcgcgtgctcgacgagcgccgggccaggggagccaagacggccggggtggacatgatggaccggctgatcgccgcggaggacgagggcgggcggcggctgcaggacgacgagatcatcgacgtgcttgtcatgtacctgaacgccggccacgagtcctccggccacatcaccatgtgggccaccgtcttcctgcaggagaaccccgacatcctcgccaaggccaaggcggagcaggaggcgatcatgaggagcatcccgccggggcagaaggggctcaccctccgggacttcaggaagatggagtacctctcacaggtggtcgacgagacgctgcggttcgtcaacatctccttcgtgtcgttccgccaggcgacccgcgacgtcttcgtcaacggttatctgatacccaaggggtggaaggtgcagctgtggtacaggagcgtgcacatggaccctcaggtgtaccctgaccccaagaagttcgacccttcaagatgggagggcccgccgccgagggccggaacgttccttcctttcgggctcggcacgaggctgtgcccgggcaacgatctcgccaagcttgagatctctgtcttcctccaccatttcctccttggatacaagctgacaaggaaaaatccaaattgccgggtgaggtacctgccgcacccccggccggtggacaattgcctggccaagatcaccagagtctcctcctcccattgacgatgatgaaaacagagaatccaaaaccctagacggcgtcgcccagaagcgccaaatttaggaaaactcatgtgtccagac

SEQ ID NO: 516 - protein, 491 aa, Triticum aestivum
  misc_feature: Ceres CLONE ID no.703821
  misc_feature: Bit score of 243.5 for HMM based on sequences of FIGURE 7.
  misc_feature (230)..(459): Pfam Name: p450 Pfam Description: Cytochrome P450
  misc_feature: Functional Homolog Of Ceres SEEDLINE ID no. ME06336 at SEQ ID NO. 441
MGELAWAALAGLLVPLAAVALDAAVRAAHAWYWTASLGAGRRGRLPPGDMGWPLVGGMWAFLCAFKSGRPDSFIDSFARRFGRAGLYRAFMFSSPTIMVTTPDACKQVLMDDDTFVTGWPKATVALIGPKSFINMGYDEHRRLRKLTAAPINGFDALTSYLGFIDHTVVTTLRGWSDRGSDFEFLTELRRMTFRIIVQIFMGGADERTAAELESTYTELNYGMRAMAIDLPGFAYHKAIRARRRLVAALQRVLDERRARGAKTAGVDMMDRLIAAEDEGGRRLQDDEIIDVLVMYLNAGHESSGHITMWATVFLQENPDILAKAKAEQEAIMRSIPPGQKGLTLRDFRKMEYLSQVVDETLRFVNISFVSFRQATRDVFVNGYLIPKGWKVQLWYRSVHMDPQVYPDPKKFDPSRWEGPPPRAGTFLPFGLGTRLCPGNDLAKLEISVFLHHFLLGYKLTRKNPNCRVRYLPHPRPVDNCLAKITRVSSSH

SEQ ID NO: 517 - protein, 476 aa, Oryza sativa subsp. indica
  misc_feature: Public GI ID no.125558547
  misc_feature: Bit score of 259.4 for HMM based on sequences of FIGURE 7.
  misc_feature (29)..(467): Pfam Name: p450 Pfam Description: Cytochrome P450
  misc_feature: Functional Homolog Of Ceres SEEDLINE ID no. ME06336 at SEQ ID NO. 441
MPFALLLALLVPTLLHFVIRCKYSSYNLPPGSLGFPLIGQSISLLRALRSNTDYQWYQDRIKKYGPVFKMSLFGSPTVLMAGPAANHFVFSNQDLIFTQTKAINTILGRSILTLSGEELKQVRSALQGYLRLEMVTKYMCKMDEEVRRHIDLNWVGHKTVKAAPLAKRLTFDIICSVVFGQGIGPIREALATDFETLVQALLSLPVNMPFTKFNKGLRASRRIRKVLRQIAREREAALQQGHSSSADDFFTYMLVLRSEGTHSLTVEDIVDNAIVILTAGYGTTAVLITFLLRYLANDPDILGKITEEQEEIARREGPNEPLTWNDVSRMKYTWKVALETLRTVPPIFGSFRTAVKDIEYHGYHIPKGWQVFTAQSITHLDGNFFNDPVKFDPTRFDNQTSLPPYCFVPFGGGPRMCPGNEFARTETLVTMHYLVRQFRWKLCCEEEGYRKDPVPIPVLGLPIELETRSPPEYAHA

SEQ ID NO: 518 - protein, 468 aa, Hordeum vulgare subsp. vulgare
  misc_feature: Public GI ID no.81362266
  misc_feature: Bit score of 328.6 for HMM based on sequences of FIGURE 7.
  misc_feature (41)..(464): Pfam Name: p450 Pfam Description: Cytochrome P450
  misc_feature: Functional Homolog Of Ceres SEEDLINE ID no. ME06336 at SEQ ID NO. 441
MGAFILLLCLLVPLVLVCAVRARKGAGGRSSSGGGKKGRLPPGSMGWPYVGETTQLYSSKNPNVFFARKRNKYGPIFKTHILGCPCVMVSSPEAAKFVLVTQAHLFKPTFPASKERMLGRQAIFFQQGDYHTHLRRLVSRAFSPEAIRGSVSSIEAIALRSLGSWEGHEVNTFQEMKTYALNVALLSIFGEEEMQYIEELKQCYLTLEKGYNSMPVNLPGTLFHKAMKARKRLGAIVAHIISARRERERGSDLLGSFMDGREALTDDQIADNAIGVIFAARDTTASVLTWMVKFLGDNPAVLKAVTEEHAEIAREKALSGEPLSWADTRRMRVTGRVIQETMRVASILSFTFREAVEDVEYQGYLIPKGWKVLPLFRNIHHNPDHFPSPEKFDPSRFEVAPKPNTFMPFGNGTHSCPGNELAKLEMLVLCHHLATKYRWSTSKSESGVQFGPFALPINGLPMTFTRKA

SEQ ID NO: 519 - protein, 506 aa, Oryza sativa subsp. indica
  misc_feature: Public GI ID no.114329478
  misc_feature: Bit score of 315.1 for HMM based on sequences of FIGURE 7.
  misc_feature (52)..(485): Pfam Name: p450 Pfam Description: Cytochrome P450
  misc_feature: Functional Homolog Of Ceres SEEDLINE ID no. ME06336 at SEQ ID NO. 441
MAFLLFFVFVTAAVLCFVVPAFLLLCTSVQRRRDVGQGGGRDWQKKKKLRLPPGSMGWPYVGETLQLYSQDPNVFFASKQKRYGEIFKTNLLGCPCVMLASPEAARFVLVSQARLFKPTYPPSKERMIGPSALFFHQGEYHLRLRRLVQAALAPDSLRALVPDVDAAVAATLAAWSGGHVASTFHAMKKLSFDVGVVTIFGGRLGRRHREELRTNYSVVERGYNCFPNRFPGTLYHKAIQARKRLRAILSEIVAERRARGGGGDDLLGGLMRSRDDGTAGAVALLTDDQIADNVVGVLFAAQDTTASVLTWILKYLHDSPKLLEAVKAEQMAIYVANEGGKRPLTWTQTRSMTLTHQVILESLRMASIISFTFREAVADVEYKGFLIPKGWKVMPLFRNIHHNPDYFQDPQKFDPSRFKVAPRPSTFLPFGSGVHACPGNELAKLEMLVLVHRLVTAYRWEIVGASDEVEYSPFPVPRGGLNAKLWKQEAEEDMYMAMGTITAAGA

SEQ ID NO: 520 - protein, 555 aa, Oryza sativa subsp. indica
  misc_feature: Public GI ID no.125561872
  misc_feature: Bit score of 315.1 for HMM based on sequences of FIGURE 7.
  misc_feature (52)..(485): Pfam Name: p450 Pfam Description: Cytochrome P450
  misc_feature: Functional Homolog Of Ceres SEEDLINE ID no. ME06336 at SEQ ID NO. 441
MAFLLFFVFVTAAVLCFVVPAFLLLCTSVQRRRDVGQGGGRDWQKKKKLRLPPGSMGWPYVGETLQLYSQDPNVFFASKQKRYGEIFKTNLLGCPCVMLASPEAARFVLVSQARLFKPTYPPSKERMIGPSALFFHQGEYHLRLRRLVQAALAPDSLRALVPDVDAAVAATLAAWSGGHVASTFHAMKKLSFDVGVVTIFGGRLGRRHREELRTNYSVVERGYNCFPNRFPGTLYHKAIQARKRLRAILSEIVAERRARGGGGDDLLGGLMRSRDDGTAGAVALLTDDQIADNVVGVLFAAQDTTASVLTWILKYLHDSPKLLEAVKAEQMAIYVANEGGKRPLTWTQTRSMTLTHQVILESLRMASIISFTFREAVADVEYKGFLIPKGWKVMPLFRNIHHNPDYFQDPQKFDPSRFKVAPRPSTFLPFGSGVHACPGNELAKLEMLVLVHRLVTAYRWEIVGASDEVEYSPFPVPRGGLNAKLWKQEAEEDMYMAMGTITAAVVMSLLSSLTVTPVSATLKCCHMPEVCGYQGLASSFKEISLSFLKEIEESV

SEQ ID NO: 521 - DNA, 1881 bp, Triticum aestivum
  misc_feature: Ceres CLONE ID no.860408
  misc_feature: Encodes the peptide sequence at SEQ ID NO. 522
accattcgaaagatccaccgaagatttttctcctcactctcctcgacctcacagctctcctctgccagcagcgcagatttatagacacaagctagcacacagcaagctcagagcacctcgctggtctaagtgatccttctcaaggatcatttggatggcctcttcctcctcctcctgtgcatcctcatttctgcggccatcgtgtcctacgcccaccacgtaatccggcggcaacgccagggctgcgctcatggccgccatgagcaagccgccctcaagctgccccctggctccatgggcctgccttacatcggcgagaccctccagctctactcccaggaccccagcgtcttcctctcctccaagcagaagcggtacggcgagatcttcaagacgcacctcctcggctgcccgtgcgtgatgctggcgagcccggaggcggcgcggttcgtgctggtgtcgcgggcaaacctgttcaagccgacgtacccgcggagcaaggagcgcctcatcggcccgtcggcgctcttcttccaccagggcgactaccacctccgtctccgcaggctcgtccagggcccgctcggccccgaggccctgcgcaagctcgtgccggacatcgaggccgccgtgcgggcaaccctcgcggcctgggcggacggcgacgtcgccagcaccttccacgccatgaagaggctctcgttcgacgtcggcatcgtgacgatcttcggcgggcggctggacgagcggcggaaggaggagctccggcggaactacgccgtcgtggagaaaggctacaactccttccccaacagcttccccgggacgctatactacaaggcgatccaggcgaggcggcggctgaacggcgtgctgagcgacatcctgcacgagaggagggagcggggcgagcccggcgacgacctgctcggctgcctcatgcggtcgcgggccggcggcgacgacggcgacgagggcgcgctgttgacggacgagcaggtcgccgacaacgtcatcggcgtgctgttcgcggcgcaggacacgacggccagcgtgctcacctggatcgtcaagtacctccacgaccggccgaagctgctggaggccgtgagggcggagcacgccgcgatccacgaggccaacgacggcgggaggcggccgctgacatgggcgcagacgaggagcatgacgctgacgcacagggtgattttggagagcctgaggatggcgagcatcatctccttcacgttcagggaggccgtggccgacgtggagtacaaagggtttcttatccccaaggggtggaaggtgatgccgctcttcaggaacatccatcacagcccggactacttccaggatccacagaagttcgacccttcgagattcaaggtggcgccgcggccgagcaccttcacgccgttcgggagcggggtgcacgcgtgccccgggaacgagctggccaagctcgagatgctggtgctcatccaccacctggtcaccggctacaggtgggaggttgttggatcgagcgacgacgtcgagtacagcccattccctgttccccagaacggcctgctcgccaggttacggcgggatgacagcgtctgcgtgggtaggaaggggtgcccgactgatgacaactacgacgacgaagacgaagtgatagtgtgattagtcaacgtagatagctagagggctcttctctccctttttgttgttattgttgttgttgttgttgtggcattcttctctaggaaaatcattagagaagaaacaacagaacgactttttaggatgacgatgatcatgtaccgtagtggttatgttgtcaatgatgtattgtcattgatacacgcataaaatgacgcttcctttttccgg

SEQ ID NO: 522 - protein, 458 aa, Triticum aestivum
  misc_feature: Ceres CLONE ID no.860408
  misc_feature: Bit score of 264.4 for HMM based on sequences of FIGURE 7.
  misc_feature (2)..(408): Pfam Name: p450 Pfam Description: Cytochrome P450
  misc_feature: Functional Homolog Of Ceres SEEDLINE ID no. ME06336 at SEQ ID NO. 441
MGLPYIGETLQLYSQDPSVFLSSKQKRYGEIFKTHLLGCPCVMLASPEAARFVLVSRANLFKPTYPRSKERLIGPSALFFHQGDYHLRLRRLVQGPLGPEALRKLVPDIEAAVRATLAAWADGDVASTFHAMKRLSFDVGIVTIFGGRLDERRKEELRRNYAVVEKGYNSFPNSFPGTLYYKAIQARRRLNGVLSDILHERRERGEPGDDLLGCLMRSRAGGDDGDEGALLTDEQVADNVIGVLFAAQDTTASVLTWIVKYLHDRPKLLEAVRAEHAAIHEANDGGRRPLTWAQTRSMTLTHRVILESLRMASIISFTFREAVADVEYKGFLIPKGWKVMPLFRNIHHSPDYFQDPQKFDPSRFKVAPRPSTFTPFGSGVHACPGNELAKLEMLVLIHHLVTGYRWEVVGSSDDVEYSPFPVPQNGLLARLRRDDSVCVGRKGCPTDDNYDDEDEVIV

SEQ ID NO: 523 - protein, 489 aa, Oryza sativa subsp. indica
  misc_feature: Public GI ID no.125558542
  misc_feature: Bit score of 295.6 for HMM based on sequences of FIGURE 7.
  misc_feature (225)..(485): Pfam Name: p450 Pfam Description: Cytochrome P450
  misc_feature: Functional Homolog Of Ceres SEEDLINE ID no. ME06336 at SEQ ID NO. 441
MEFSLVVALIAVASSCVFVHFLARGATKKRRSPAAKKLPPGSLGLPVIGQSLGLLRAMRSNSGERWVRRRIDRYGAVSKLSLFGKPTVLVAGAAANRFVFFSGALALQQPRSVQRILGDRSILDLVGADHRRVRGALSEFLRPEMLRMYVGKIDGEARRHVAGCWSGRAAVTVMPLMKRLTFDIIASLLFGLGPGAAARDALAGDFERVMGGMWAVPVDLPFTAFRRSLRAAARARRLLAGITRERKAALERGAATRSSDLIACLLSLTDDRGGAPLLSEEEIVDTAMVALVAGHDTSSILMTFMVRHLANDPDTLAAMHEEIARSKRDGEALTWEDLTRMKLTWRVAQETLRMVPPVFGNFRRALEDIELDGYVIPKGWQVFWVASVTHMDAAIFHDPDKFLPSRFDSQSSSPSTAKAAPPCSYVAFGGGPRICPGIEFARIETLVMMHHLVRKFRWKLCCKEDTFARDPMPTPLHGLPIEIEPRISP

SEQ ID NO: 524 - protein, 519 aa, Zea mays
  misc_feature: Public GI ID no.5915847
  misc_feature: Bit score of 218.4 for HMM based on sequences of FIGURE 7.
  misc_feature (257)..(489): Pfam Name: p450 Pfam Description: Cytochrome P450
  misc_feature: Functional Homolog Of Ceres SEEDLINE ID no. ME06336 at SEQ ID NO. 441
MLGVGMAAAVLLGAVALLLADAAARRAHWWYREAAEAVLVGAVALVVVDAAARRAHGWYREAALGAARRARLPPGEMGWPLVGGMWAFLRAFKSGKPDAFIASFVRRFGRTGVYRSFMFSSPTVLVTTAEGCKQVLMDDDAFVTGWPKATVALVGPRSFVAMPYDEHRRIRKLTAAPINGFDALTGYLPFIDRTVTSSLRAWADHGGSVEFLTELRRMTFKIIVQIFLGGADQATTRALERSYTELNYGMRAMAINLPGFAYRGALRARRRLVAVLQGVLDERRAARAKGVSGGGVDMMDRLIEAQDERGRHLDDDEIIDVLVMYLNAGHESSGHITMWATVFLQENPDMFARAKAEQEAIMRSIPSSQRGLTLRDFRKMEYLSQVIDETLRLVNISFVSFRQATRDVFVNGYLIPKGWKVQLWYRSVHMDPQVYPDPTKFDPSRWEGHSPRAGTFLAFGLGARLCPGNDLAKLEISVFLHHFLLGYKLARTNPRCRVRYLPHPRPVDNCLAKITRVGS

SEQ ID NO: 525 - protein, 499 aa, Hordeum vulgare
  misc_feature: Public GI ID no.50401144
  misc_feature: Bit score of 235.3 for HMM based on sequences of FIGURE 7.
  misc_feature (272)..(466): Pfam Name: p450 Pfam Description: Cytochrome P450
  misc_feature: Functional Homolog Of Ceres SEEDLINE ID no. ME06336 at SEQ ID NO. 441
MGEGAWWAVAAVVAALAVVALDAAVRAAHAWYWTASLGAGRRGRLPPGDMGWPLVGGMWAFLRAFKSGRPDSFIDSFARRFGRAGLYRAFMFSSPTIMATTPEACKQVLMDDDAFVTGWPKATVALIGPKSFVNMGYDEHRRLRKLTAAPINGFDALTSYLGFIDDTVVTTLRGWSERGGDGHFEFLTELRRMTFRIIVQIFMGGADERTAAELERTYTELNYGMRAMAIDLPGFAYHKAIRARRRLVAALQRVLDERRARGGKTAAGAAAPVDMMDRLIAVEDEGGRRLQDDEIIDVLVMYLNAGHESSGHITMWATVFLQENPEILAKAKAEQEAIMRSIPPGQKGLTLRDFRKMAYLSQVVDETLRFVNISFVSFRQATRDVFVNGYLIPKGWKVQLWYRSVHMDPQVYPDPKKFDPSRWEGPPPRAGTFLPFGLGTRLCPGNDLAKLEISVFLHHFLLGYKLTRKNPNCRVRYLPHPRPVDNCLAKITRLSSSHG

SEQ ID NO: 526 - DNA, 1569 bp, Triticum aestivum
  misc_feature: Ceres CLONE ID no.892452
  misc_feature: Encodes the peptide sequence at SEQ ID NO. 527
atcactctccaatggattatctggccatagtcgtggcacccgttgtcgccattgccatccacctcctcagcagggccaagaaaagacggccggccaacctgcctccgggctccctcggcctgccggtgatcgggcagagcctcggcctcctccgggccatgcgcggcgccgacggcggcaaccggtgggtacaggaccggatcgacaggtacgggcccgtgtcgaagctatcgctgttcggcacgccgacggtgctcctggccggaccggcggccaacaagtttttgttcttcagcagcgcgctttcgacgcggcagccccggtccgtgcagcggatacttggcgagaacagcatcctggacctccacggcgccgaccaccggcgcgtccgcggtgctctgctcgagttcctcaggccggacatgctcaagatgtacgtgggcgggatcgacgccgaggtgcggcgccacgtcgaggagaactgggccggccgcgggacggtgacggtgctgccgctgatgaagcggctgacgttcgacatcatctccgcgctgctcttcggcctggagaggggcgccgttcgggacgcgctggccggcgacttcgcgcacatgatggagggcatgtgggcgatcccggtgaacttgccgttcacggcgttcagccggagcctcaaggccagcgggagagcccgtcgggtgctagcggggatcacgcaggagaagaaggccggccggtgccagccggagcacggcaaggcgccgcggagtaacgacctcataacctgcctgctcggcctgacggacggccatggcgagcggctgctgagcgacgaggagatcgtggacaacgccatggtcgccctcatcgccggccacgacacctcgtccatcctgatgaccttcatggtccgccacctcgccaacgatgacaccaccctcgccgccatggtccaagagcacgaggagatcgccatgaacaaaggcgacggagaggctctcacctgggaggatctgacgaagatgaagttcacatggcgagtcgcgcaggagatccttcgcaccgtccctccgatcttcggcaacttcagaagagcgctggaggacgtcgagttcgacggctacctcatcccaaaaggatggcaggtgttctggacggcgaacgtgacgcacatggacgcgagcatcttccacgagccggccaagttcgacccgtcccggttcgagaaccaggccgcgtcggcggcgccgccgtgctccttcgtcgccttcgggggcggcccgaggatatgccccgggatagagttctcccggatcgagacgctggtgacgatgcaccacctcgtgaggcggttcagatggaagctctgctgcaaggagaacaccttcgtgagggaccccatgccgtcgccgctgcgtggcctgcccatccaaatcgagcgtaggacctccccgccgccgtgatcgagcttgacggcaatctcagtgtcatggtcggtcgcatttcattagaaaatatagctgctcctgcacgtgtatgtgtgatgagtaataaatggccatcactacc

SEQ ID NO: 527 - protein, 483 aa, Triticum aestivum
  misc_feature: Ceres CLONE ID no.892452
  misc_feature: Bit score of 303.3 for HMM based on sequences of FIGURE 7.
  misc_feature (31)..(477): Pfam Name: p450 Pfam Description: Cytochrome P450
  misc_feature: Functional Homolog Of Ceres SEEDLINE ID no. ME06336 at SEQ ID NO. 441
MDYLAIVVAPVVAIAIHLLSRAKKRRPANLPPGSLGLPVIGQSLGLLRAMRGADGGNRWVQDRIDRYGPVSKLSLFGTPTVLLAGPAANKFLFFSSALSTRQPRSVQRILGENSILDLHGADHRRVRGALLEFLRPDMLKMYVGGIDAEVRRHVEENWAGRGTVTVLPLMKRLTFDIISALLFGLERGAVRDALAGDFAHMMEGMWAIPVNLPFTAFSRSLKASGRARRVLAGITQEKKAGRCQPEHGKAPRSNDLITCLLGLTDGHGERLLSDEEIVDNAMVALIAGHDTSSILMTFMVRHLANDDTTLAAMVQEHEEIAMNKGDGEALTWEDLTKMKFTWRVAQEILRTVPPIFGNFRRALEDVEFDGYLIPKGWQVFWTANVTHMDASIFHEPAKFDPSRFENQAASAAPPCSFVAFGGGPRICPGIEFSRIETLVTMHHLVRRFRWKLCCKENTFVRDPMPSPLRGLPIQIERRTSPPP

SEQ ID NO: 528 - DNA, 1866 bp, Zea mays
  misc_feature: Ceres CLONE ID no.1628466
  misc_feature: Encodes the peptide sequence at SEQ ID NO. 529
aacagcctgctgctgtgcagtgtgcaccaccaacatctgacatctccaatggattcttctcttgtcctagcgcttatcgccgtcgccttgcccgtgctcctccatctcctaaagaggggaaagacgccatggcggccggccgcggccaagctgccgccgggctcccttggcctgccggtgatcggccagagcatcggtcttctccgcgccatgcgcgccaacactgccgagcggtggatcctggaccggatacaccggtacggtccggtgtccaagctgtcgctgttcggcaggccgacggtgctcgtcgcggggtcggcggccaacaggttcatcttcttcagcagcgccttagcgatgcagcagcctcggtcagtgcagcggatcctgggggacaagagcatcctggagctcacgggcgccgaccacaagcggatccgcggcgcgctggtcgagttcctcaagccggacatgctgaggctgtacgtgggcaagatcgacggcgaggttcggcgccacctcgacgagtgctgggccggccgctgcaccgtcacggtgatgccgcacatgaagaggctcacgttcgacatcatctccctgctgctcttcggcctcgagcggagcccgctccaggacgccctcgcgggcgacttcgcccgcgtcatggatggcatatgggccgtcccggtgaacctgccgttcacggcgttcagccggagcctcagggccagcgccagggctcgccggctgatcgcggggatcgcgcgggagaccagggccaagctggaaaggggcgaggcctcccgtagcagcgacctcatcgcgtgcctgctcagtctgaccgaccacagcggcgcgcggctgctgagcgaggaggagatcgtggacaactccatggtggccctcgtcgccggtcacgacacgtcgtcagttctcatgacgttcatggtccgccacctcgccaacgacccggacaccctcgccgccatggtccaagagcacgacgagatcgcaaagaacaagggcgacggccagaccctggactgggaggacctggcgaagatgaagtacacgtggcgcgtcgcgctggagacccttcgcttggtgcctcccatcttcggcaacttccggcgagcgatgcaggacatcgagttcgacggctacctcatcccaaaaggatggcaggtgttctgggcggcgagcgtgacgcacatggacacgggcatcttccacgagccggcaaagttcgacccgtcccggttcgagaaccagtcggcggcatcggcgccgccgtgctcgttcgtcgcgttcggcgggggtccgaggatctgcgtcggcatggagttcgccaggatcgagacgctggtgacgatgcattaccttgtcaggcggtttaggtggaagctctgctgcaagaacgataccttcgccagggaccccatgccatcgccgctgcacggactgcccatagaacttgagcagaaggcatcgccatgatcgtgacaaaattcggcggcagatatacatggcagtgctttttaaggatcagggagtggggtggggaggagattagcccctactggaaaataaattaacacgtagaaaaattagctctactgcataaaagaaaaaaacaaatcatgaaaatatatttcataatgcatcaaatgatattaagagcatatataatgtgtgttttgagctgtgtcttcagacgcgtctaaggtgataaatgtaaaaaaaatctaagacatgtctcttgatgaagttattatgtcttgtctctatgctcgagactgaggactgactaattagtcaatttaatttattgaataattgattggtgtaatgaatatagtaagacac

SEQ ID NO: 529 - protein, 482 aa, Zea mays
  misc_feature: Ceres CLONE ID no.1628466
  misc_feature: Bit score of 317.6 for HMM based on sequences of FIGURE 7.
  misc_feature (234)..(454): Pfam Name: p450 Pfam Description: Cytochrome P450
  misc_feature: Functional Homolog Of Ceres SEEDLINE ID no. ME06336 at SEQ ID NO. 441
MDSSLVLALIAVALPVLLHLLKRGKTPWRPAAAKLPPGSLGLPVIGQSIGLLRAMRANTAERWILDRIHRYGPVSKLSLFGRPTVLVAGSAANRFIFFSSALAMQQPRSVQRILGDKSILELTGADHKRIRGALVEFLKPDMLRLYVGKIDGEVRRHLDECWAGRCTVTVMPHMKRLTFDIISLLLFGLERSPLQDALAGDFARVMDGIWAVPVNLPFTAFSRSLRASARARRLIAGIARETRAKLERGEASRSSDLIACLLSLTDHSGARLLSEEEIVDNSMVALVAGHDTSSVLMTFMVRHLANDPDTLAAMVQEHDEIAKNKGDGQTLDWEDLAKMKYTWRVALETLRLVPPIFGNFRRAMQDIEFDGYLIPKGWQVFWAASVTHMDTGIFHEPAKFDPSRFENQSAASAPPCSFVAFGGGPRICVGMEFARIETLVTMHYLVRRFRWKLCCKNDTFARDPMPSPLHGLPIELEQKASP

SEQ ID NO: 530 - DNA, 2211 bp, Zea mays
  misc_feature: Ceres CLONE ID no.1546594
  misc_feature: Encodes the peptide sequence at SEQ ID NO. 531
accccagtccccacctcttctcttcctcctcctcgtccgccgttgctgtctgtctcctcctcctccgccgccgcctagctgcttactacgtgcttccaccgcaacaagcacagagtgcgagcaaagacagaaagccatgggcgccctgttgctcttcgccgtctgcctgctggcgccgatcgtgctggcctgcgccgtccgtggcaggaagcggcgggccgccgcgccggcgtccggcaagaaggcgctgccgctgccgctgccgccggggtcgatggggtggccgtacgtgggggagacgctgcagctctactcgtccaagaaccccaacgtgttcttcgcccggaagcagaaccggtacgggccgatcttcaggacccacatcctgggctgcccctgcgtgatggtgtccagcccggaggcggcgcgcttcgtgctcgtcacgcaggctcacctcttcaagcccaccttcccggcgagcaaggagcgcatgctgggcccgcaggccatcttcttccagcagggcgactaccacgcccgcctccgccgcctcgtctcccgggctttctcaccccaggccatccgcgcctccgtgccggctgtcgaggccgtcgcgctgcgctcgctccgctcctgggacggccgcctcgtcaacaccttccaagagatgaagctgtacgcgctgaatgtggcattgctgtccatcttcggcgaggaggagatgcggtacatcgaggagctgaagcagtgctacctgacgctggagaaggggtacaactcgatgccggtgaacctgccgggcaccctgttccacaaggccatgaaggcccgcaagcggctgagcgccatcgtggcccacatcatcgaggcccggcgcgagcggccgcggccgcgcgggagcgacctcctggcctccttcctggacggccgcgaggcgctcaccgacgcccagatctccgacaacgtgatcggcgtcatgttcgccgcccgcgacaccaccgccagcgtgctcacctggatggtcaagttcctcggcgaccacccggcggtcctcaaggcggtcatcgaggagcagcaggagatcgctcggtccaagggctcctccggcgacgaacccctgacgtgggcggacaccaggcggatgcgcgtgacgagccgtgcgatccaggagacgatgcgggtggcgtccatcctgtccttcaccttccgggaggccgtggaggacgtggagtaccaagggtacctgatccccaagggctggaaggtgttgcccctgttccggaacatccaccacagccccgaccacttcccctgcccggacaagttcgacccctcccgattcgaggttgctcccaagcccaacacgttcatgccgttcggcaacgggacccactcgtgcccggggaacgagctcgccaagctggagatgctcgtgctcttccaccacctcgtcaccaaatacaggtggtccacctccaagtccgagagcggcgtgcagttcggccccttcgcgctgccgctcaacggcctgcccatgaccttcgctcgcaaggactgatctatcggagccactgcacggccatggatggtggtatatgctagcactacactactagtaatacccaggaacgcgaaaaccgcttcccgggatcggggcgtcggccgcgttgcggcggcggccatcggacgggacagggaaggtgacggtgacgggcatcaggcgggcgggcatgggccatgggatcgatgatcagagaaagaaagattacgcagctccttgtacagattcttcctcagctagtagggccggatcccaagaagccggaagaggagaccaaacacaaaattaggcatagccgcttaggtgccactcactctaagctactagtactccagtaggcaagcatcagatcacccagctgcgctacaaacaagtggcgtttaattgtaaaaccaaaccattttttttctctatcttcttcttcttctttttccctcccctttagattttttttataagccagccagatagtggcacccataggagagaagaacacaaggaaaccataaaagaaagagagggaggccctgattgggattctaattgtaagctagctaggttgcccacctgaaagcaggctggcagctaggtcgagtaacccacggatggatggattggaatggaatggaatggaatggccagatttattg

SEQ ID NO: 531 - protein, 473 aa, Zea mays
  misc_feature: Ceres CLONE ID no.1546594
  misc_feature: Bit score of 330.5 for HMM based on sequences of FIGURE 7.
  misc_feature (43)..(469): Pfam Name: p450 Pfam Description: Cytochrome P450
  misc_feature: Functional Homolog Of Ceres SEEDLINE ID no. ME06336 at SEQ ID NO. 441
MGALLLFAVCLLAPIVLACAVRGRKRRAAAPASGKKALPLPLPPGSMGWPYVGETLQLYSSKNPNVFFARKQNRYGPIFRTHILGCPCVMVSSPEAARFVLVTQAHLFKPTFPASKERMLGPQAIFFQQGDYHARLRRLVSRAFSPQAIRASVPAVEAVALRSLRSWDGRLVNTFQEMKLYALNVALLSIFGEEEMRYIEELKQCYLTLEKGYNSMPVNLPGTLFHKAMKARKRLSAIVAHIIEARRERPRPRGSDLLASFLDGREALTDAQISDNVIGVMFAARDTTASVLTWMVKFLGDHPAVLKAVIEEQQEIARSKGSSGDEPLTWADTRRMRVTSRAIQETMRVASILSFTFREAVEDVEYQGYLIPKGWKVLPLFRNIHHSPDHFPCPDKFDPSRFEVAPKPNTFMPFGNGTHSCPGNELAKLEMLVLFHHLVTKYRWSTSKSESGVQFGPFALPLNGLPMTFARKD

SEQ ID NO: 532 - protein, 478 aa, Arabidopsis thaliana
  misc_feature: Public GI ID no.9502380
  misc_feature: Bit score of 442.3 for HMM based on sequences of FIGURE 7.
  misc_feature (209)..(473): Pfam Name: p450 Pfam Description: Cytochrome P450
  misc_feature: Functional Homolog Of Ceres SEEDLINE ID no. ME06336 at SEQ ID NO. 441
MWALLIWVSLLLISITHWVYSWRNPKCRGKLPPGSMGFPLLGESIQFFKPNKTSDIPPFIKERVKKYGPIFKTNLVGRPVIVSTDADLSYFVFNQEGRCFQSWYPDTFTHIFGKKNVGSLHGFMYKYLKNMVLTLFGHDGLKKMLPQVEMTANKRLELWSNQDSVELKDATASMIFDLTAKKLISHDPDKSSENLRANFVAFIQGLISFPFDIPGTAYHKCLQGRAKAMKMLRNMLQERRENPRKNPSDFFDYVIEEIQKEGTILTEEIALDLMFVLLFASFETTSLALTLAIKFLSDDPEVLKRLTEEHETILRNREDADSGLTWEEYKSMTYTFQFINETARLANIVPAIFRKALRDIKFKEFVNDTDYTIPAGWAVMVCPPAVHLNPEMYKDPLVFNPSRWEGSKVTNASKHFMAFGGGMRFCVGTDFTKLQMAAFLHSLVTKYRWEEIKGGNITRTPGLQFPNGYHVKLHKKRD

SEQ ID NO: 533 - protein, 495 aa, Oryza sativa subsp. japonica
  misc_feature: Public GI ID no.115454431
  misc_feature: Bit score of 431.0 for HMM based on sequences of FIGURE 7.
  misc_feature (227)..(475): Pfam Name: p450 Pfam Description: Cytochrome P450
  misc_feature: Functional Homolog Of Ceres SEEDLINE ID no. ME06336 at SEQ ID NO. 441
MEGIHAGTVTMACSWLVLTAAMAVLASWLIRLVSLKWNSSHPCKADEGSRLPPGSRGLPLLGESLEFFTSSTSLELPVFFKRRLNRYGPVFRTNMVGQDLIVCLDPEVNSFVFQQEERLFQCWYPDSFMRIIGADNIITTLGSSHKYIRNLILRLFGPENLRRAMLQDVHRTAQASLLSWLDRPSIELKDAVSSMIFSVTAKKLISYDSLASDGKMWKQFDAFIRGLLAFPIGIPGTAFYKCMQGRKNIMKMLKELIDERKEASGRRGSIDFIDVLLEELNEEKPLISENVALDLIFLLLFASFETTASAITAVVRFLTDNPEALQELAEEHDNIQKRRVDLNSEITWEEYKSMKFTSHVIHEALRLANIAPVMFRKATEDVHIKGFFIPKGSKIMICPSTVHLNPMIYKDPNIFNPWRWKDTAEPTGGASKDFMAFGGGLRLCVGADFAKLQTAIFLHCLVTKYRWKAIKGGTMVLGPGLRFPEGFHIQLFPKP

SEQ ID NO: 534 - protein, 487 aa, Pinus taeda
  misc_feature: Public GI ID no.59800266
  misc_feature: Bit score of 533.8 for HMM based on sequences of FIGURE 7.
  misc_feature (206)..(483): Pfam Name: p450 Pfam Description: Cytochrome P450
  misc_feature: Functional Homolog Of Ceres SEEDLINE ID no. ME06336 at SEQ ID NO. 441
MGSGIMTETLTDSWLVGLLCLVLGFLLLQLYKLVWGASSRAYKLPPGSTGWPLIGETISFFRGINSTAQPRQFIQEREQRYGEIFRSNLFGRSRIVVSVDPEFNKHVLQHEGRQFQANYPKPLRNLIGKYGLLSVHGDLQRKLHGAAVNLLRFERLSVDFMEDIQNLLHITLAKWEAKRDIHLQEECHQLVLNLMAKQLLDLSPSKDTEEICEAFGHFSEALLAVPIKIPGTKYARGFKAREFLIKKIYESIEDRRQHPEAVHNDLLTKLLKEDSFSEEIIADFILFLLFAGHETSSRSMSFAIKFLTDCPRALEELKAEHDALLKRKGNLKNQKLNWDDYQSLKFTQCVIHETLRVGNFGPGVFRETKEDIKTKGGFVIPRGWTVYVFLTGTHLDEKYHSSALKFDPWRWQPHLQDQELLKNPSFMPFGGGARLCPGMHLAKMELALFLHNFVTKFRWEALQDDKISYFPFPRLIKGLPIRLRLRE

SEQ ID NO: 535 - DNA, 1482 bp, Populus balsamifera subsp. trichocarpa
  misc_feature: Ceres ANNOT ID no.1543618
  misc_feature: Encodes the peptide sequence at SEQ ID NO. 536
atgaatattaacacggacaatttattgtggattgcgttagcaatctcgttgtccagtactgccataatatttctctacaggaacagcagctggtttagtagcagtagtatgatgacgatcagattatcatcatcaaagtacaaaaccccacttcctttaggcactcttggatggccctttatcggtgaaaccatcgacttcgtttcatgtgcttactcagaccgccctgaaagcttcatggataaacgccgtcgcatgtatgggaaggtgttcaagtcacatatatttggaagtccgactatagtatcaacagatgcagaagtgagcaaatttatactacaaagtgatgcaaaggtgttcgttccttcttacccgaaatctctaaccgagttgatgggaaaatcttccattttgctcatcaatgggagcttacaaaggagaattcatggtctcataggtgccttcttcaaatcccctcatctcaaagctcaaatcacccgagacatgcaaagttatgttcaagaatcaatggagaaatggagagaagaccagcccattttcatacaagatgaaaccaagaatattgcctttcaagtattagtcaaggcattgattagtttggatcctggtgaagaaatggagctgctaaagaaacagttccaagaattcattgctggtctcatgtccttacctttaaacatccctggaagtcaactttatcgatcattacaggcaaagaagaaaatggtgaagttagtgcagaaaatcatccaatctaaaagagaaggtagagctgggattgtttcaatggcaccaaaggatgtagcggaagtgttgcttaatgatgcaagtgaacagttaacagatgatttaatagctgataatatgatcgatatgatgatacctggtgaggattcagtgccggtcctcatgactcttgctgttaagtacctttcagattgccctgctgctctgcaacaattgacgaaggagaacatgaaattgaaaagtctcaaagctcagcatggggagccattgtgctggactgattatttatctctaccctttactcaaacggtgatcacagaaactctaagaatgggaaacataataatcggggtgatgagaaaggcgatgaaggacacagaaattaaagggtatttgatacccaaaggatggtgtgcttttgcatatttcaggtcagttcatcttgatgaaaacaactatgagtggccttacgaattcaatccatggaggtggcaagacaaggatatgagcattaatggcagcttcactccatttggaggaggacaaagattatgtcctggacttgacctcgccaggctggaagcttcaatcttcttgcaccactttgtcacccagttcaggtgggtggctgaggaggatactgtagtgaatttccctactgtaagaatgaagagaagaatgccgatttgggtcaaaaggggaggagaaaattaa

SEQ ID NO: 536 - protein, 456 aa, Populus balsamifera subsp. trichocarpa
  misc_feature: Ceres ANNOT ID no.1543618
  misc_feature: Bit score of 761.8 for HMM based on sequences of FIGURE 7.
  misc_feature (307)..(427): Pfam Name: p450 Pfam Description: Cytochrome P450
  misc_feature: Functional Homolog Of Ceres SEEDLINE ID no. ME06336 at SEQ ID NO. 441
MTIRLSSSKYKTPLPLGTLGWPFIGETIDFVSCAYSDRPESFMDKRRRMYGKVFKSHIFGSPTIVSTDAEVSKFILQSDAKVFVPSYPKSLTELMGKSSILLINGSLQRRIHGLIGAFFKSPHLKAQITRDMQSYVQESMEKWREDQPIFIQDETKNIAFQVLVKALISLDPGEEMELLKKQFQEFIAGLMSLPLNIPGSQLYRSLQAKKKMVKLVQKIIQSKREGRAGIVSMAPKDVAEVLLNDASEQLTDDLIADNMIDMMIPGEDSVPVLMTLAVKYLSDCPAALQQLTKENMKLKSLKAQHGEPLCWTDYLSLPFTQTVITETLRMGNIIIGVMRKAMKDTEIKGYLIPKGWCAFAYFRSVHLDENNYEWPYEFNPWRWQDKDMSINGSFTPFGGGQRLCPGLDLARLEASIFLHHFVTQFRWVAEEDTVVNFPTVRMKRRMPIWVKRGGEN

SEQ ID NO: 537 - protein, 491 aa, Arabidopsis thaliana
  misc_feature: Public GI ID no.18400142
  misc_feature: Bit score of 700.8 for HMM based on sequences of FIGURE 7.
  misc_feature (356)..(490): Pfam Name: p450 Pfam Description: Cytochrome P450
  misc_feature: Functional Homolog Of Ceres SEEDLINE ID no. ME06336 at SEQ ID NO. 441
MDTSSSLLFFSFFFFIIIVIFNKINGLRSSPASKKKLNDHHVTSQSHGPKFPHGSLGWPVIGETIEFVSSAYSDRPESFMDKRRLMYGRVFKSHIFGTATIVSTDAEVNRAVLQSDSTAFVPFYPKTVRELMGKSSILLINGSLHRRFHGLVGSFLKSPLLKAQIVRDMHKFLSESMDLWSEDQPVLLQDVSKTVAFKVLAKALISVEKGEDLEELKREFENFISGLMSLPINFPGTQLHRSLQAKKNMVKQVERIIEGKIRKTKNKEEDDVIAKDVVDVLLKDSSEHLTHNLIANNMIDMMIPGHDSVPVLITLAVKFLSDSPAALNLLTEENMKLKSLKELTGEPLYWNDYLSLPFTQKVITETLRMGNVIIGVMRKAMKDVEIKGYVIPKGWCFLAYLRSVHLDKLYYESPYKFNPWRWQERDMNTSSFSPFGGGQRLCPGLDLARLETSVFLHHLVTRFRWIAEEDTIINFPTVHMKNKLPIWIKRI

SEQ ID NO: 538 - protein, 483 aa, Medicago truncatula
  misc_feature: Public GI ID no.92890903
  misc_feature: Bit score of 440.9 for HMM based on sequences of FIGURE 7.
  misc_feature (225)..(475): Pfam Name: p450 Pfam Description: Cytochrome P450
  misc_feature: Functional Homolog Of Ceres SEEDLINE ID no. ME06336 at SEQ ID NO. 441
MWVLCLGALVTICIITRWVYRWRNPSCNGKLPPGSMGLPLLGESLQFFSPNTSCDIPPFIRKRMKRYGPIFKTNLVGRPVVVSTDPDLNYFIFQQEGKIFQSWYPDTFTEIFGQQNVGSLHGFMYKYLKNMMLNLFGPESLKKMISEVEQAACRTLQQASCQDSVELKEATETMIFDLTAKKLISYDPTESSENLRENFVAFIQGLISFPLNIPGTAYNKCLQGRKKAMKMLKNMLQERREMPRKQQMDFFDYVIEELRKEGTLLTEAIALDLMFVLLFASFETTSQALTYAIKLLSDNPLVFKQLQEEHEAILERRENPNSGVTWQEYKSMTFTFQLITETARLANIVPGIFRKALREINFKGYTIPAGWAIMVCPPAVHLNPAKYQDPLVFNPSRWEGMEPSGATKHFLAFGGGMRFCVGTEFAKVQMAVFLHCLVTKYRWRPIKGGNIVRTPGLQFPNGFHVQITEKDQKKHESECTTTY

SEQ ID NO: 539 - protein, 473 aa, Oryza sativa subsp. japonica
  misc_feature: Public GI ID no.55733866
  misc_feature: Bit score of 656.9 for HMM based on sequences of FIGURE 7.
  misc_feature (334)..(471): Pfam Name: p450 Pfam Description: Cytochrome P450
  misc_feature: Functional Homolog Of Ceres SEEDLINE ID no. ME06336 at SEQ ID NO. 441
MQPLAAGGGVSWPLYAATVAAALLVTAIVLRLAARSTAAACKARPPAGSLGWPLVGETLQFISAAYSSRPESFVEKRCRRYGKVFRSHLWGSPAVVSADAEASRAVLQSDASAFVPWYPRSLMELMGESSILVLGGALQRRVHGLAGAFFKSPELKARVTADMRSRLAAAMDAWRATAATGAGAAVRVQDEAKLIVFEILVRALIGLEQGQEMNYLRQQFHIFIAGLISLPIKLPGTQLYRSLKAKKRMTSLIQNIIQEKRRRIFEGKDLCAVSRDLIDVLMSNGSDELSLTDELISDNMIDFMIPAEDSVPVLITLAIKYLSECPLALQQLEVITETLRIGNIISGIMRKAVRDVEVKGQGDVVIPKGWCVLVYFRSVHLDANIYDDPYAFNPWRWKERDMAAATANSGSGFTPFGGGQRLCPGLDLARLQTSIFLHHLVTNFTWVAQGDVVVNFPTVRLKRGMPIKVTPKT

SEQ ID NO: 540 - protein, 490 aa, Oryza sativa subsp. japonica
  misc_feature: Public GI ID no.115435078
  misc_feature: Bit score of 819.6 for HMM based on sequences of FIGURE 7.
  misc_feature (341)..(460): Pfam Name: p450 Pfam Description: Cytochrome P450
  misc_feature: Functional Homolog Of Ceres SEEDLINE ID no. ME06336 at SEQ ID NO. 441
MVSAAAGWAAPAFAVAAVVIWVVLCSELLRRRRRGAGSGKGDAAAAARLPPGSFGWPVVGETLEFVSCAYSPRPEAFVDKRRKLHGSAVFRSHLFGSATVVTADAEVSRFVLQSDARAFVPWYPRSLTELMGKSSILLINGALQRRVHGLVGAFFKSSHLKSQLTADMRRRLSPALSSFPDSSLLHVQHLAKSVVFEILVRGLIGLEAGEEMQQLKQQFQEFIVGLMSLPIKLPGTRLYRSLQAKKKMARLIQRIIREKRARRAAASPPRDAIDVLIGDGSDELTDELISDNMIDLMIPAEDSVPVLITLAVKFLSECPLALHQLEEENIQLKRRKTDMGETLQWTDYMSLSFTQHVITETLRLGNIIGGIMRKAVRDVEVKGHLIPKGWCVFVYFRSVHLDDTLYDEPYKFNPWRWKEKDMSNGSFTPFGGGQRLCPGLDLARLEASIFLHHLVTSFRWVAEEDHIVNFPTVRLKRGMPIRVTAKEDDD

SEQ ID NO: 541 - protein, 490 aa, Oryza sativa subsp. indica
  misc_feature: Public GI ID no.125524776
  misc_feature: Bit score of 815.7 for HMM based on sequences of FIGURE 7.
  misc_feature (341)..(460): Pfam Name: p450 Pfam Description: Cytochrome P450
  misc_feature: Functional Homolog Of Ceres SEEDLINE ID no. ME06336 at SEQ ID NO. 441
MVSAAAGWAAPAFAVAAVVIWVVLCGELLRRRRRGAGSGKGDAAAAARLPPGSFGWPVVGETLEFVSCAYSPRPEAFVDKRRKLHGSAVFRSHLFGSATVVTADAEVSRFVLQSDARAFVPWYPRSLTELMGKSSILLINGALQRRVHGLVGAFFKSSHLKSQLTADMRRRLSPALSSFPDSSLLHVQHLAKSVVFEILVRGLIGLEAGEEMQQLKQQFQEFIVGLMSLPIKLPGTRLYRSLQAKKKMARLIQRIIREKRARRAAASLPRDAIDMLIGDGSDELTDELISDNMIDLMIPAEDSVPVLITLAVKFLSECPLALHQLEEENIQLKRRKTDMGETLQWTDYMSLSFTQHVITETLRLGNIIGGIMRKAVRDVEVKGHLIPKGWCVFVYFRSVHLDDTLYDEPYKFNPWRWKEKDMSNGSFTPFGGGQRLCPGLDLARLEASIFLHHLVTSFRWVAEEDHIVNFPTVRLKRGMPIRVTAKEDDD

SEQ ID NO: 542 - DNA, 1416 bp, Populus balsamifera subsp. trichocarpa
  misc_feature: Ceres ANNOT ID no.1491583
  misc_feature: Encodes the peptide sequence at SEQ ID NO. 543
atgtgggctttgttctttggagctttgattattataagcattacacattgggtttaccgctggagaaaccccagatgcaatggcactctcccaccaggttcaatgggattgccacttattggcgagacccttcagttcttcgctccaaatacttcttgtgacatttctccatttgtcagagacaggatgaaaagatatggaccaatattccggactaatttggtcggaaggccagttgtagtatcaacagatccggatctcaattactttatcttccaacaagaaggaaaattgttccagagctggtatccggatacattcacggagatctttggaaggcaaaatgttggttcgttacatgggttcatgtacaagtatcttaagaatatggtgcttaatctcttcggtcctgaaagccttaaaaaaatgctccctgaagttgaacagacagcatcaaatagattacaactatggtctcatcaggaatcagttgaattgaaagaagcaactgcaactatgatatttgatctgacggcgaagaagctgataagttatgatcaagaaaattcttcagagaatctaagggagaactttgttgcattcatacaaggattaatctccttccctttggacattccaggaacagcatatcacgaatgcttacagggtaggaaaaaggcaatgagaatgctaaagaacctgctacaggaaagacaagcaaatccgagaaagcacgaaactgatttttttgattatgtgcttgaagaacttcaaaagaacaaaacaatccttacagaggaaatcgctctggatttaatgtttgtgctgctatttgccagctttgaaacaacttccctgggtctaactttagctgtcaagtttatatcggaccacccattggtgctaaaggaattgacggaagagcacgagggaattctaaaaaatcgggaaaatgccaactctggtcttacatggaaggaatacaaatcaatgaaattcacgtttcaggtcattaatgaaactgttagactggcaaacatagttccagggatcttcagaaaaacacttagagatatccagtttaagggctgggcagtaatggtctgtccccccgctgtacacttaaacccagcaaaatatgaagatccacttgccttcaatccatggagatggaagggtatggaagtaaatggtgcatccaaaactttcatggcctttggtggtggcatgagattttgtgttggaacagagtttaccaaggtgcagatggctgtatttctacattgcttggtcacaaagtccaggtggcaagcaatcaaaggaggaaatattgttcgaactcctggtttacaatttcccagtggttatcacattcagctcacggagagagacaaaagatataactctactacataa

SEQ ID NO: 543 - protein, 471 aa, Populus balsamifera subsp. trichocarpa
  misc_feature: Ceres ANNOT ID no.1491583
  misc_feature: Bit score of 447.9 for HMM based on sequences of FIGURE 7.
  misc_feature (224)..(431): Pfam Name: p450 Pfam Description: Cytochrome P450
  misc_feature: Functional Homolog Of Ceres SEEDLINE ID no. ME06336 at SEQ ID NO. 441
MWALFFGALIIISITHWVYRWRNPRCNGTLPPGSMGLPLIGETLQFFAPNTSCDISPFVRDRMKRYGPIFRTNLVGRPVVVSTDPDLNYFIFQQEGKLFQSWYPDTFTEIFGRQNVGSLHGFMYKYLKNMVLNLFGPESLKKMLPEVEQTASNRLQLWSHQESVELKEATATMIFDLTAKKLISYDQENSSENLRENFVAFIQGLISFPLDIPGTAYHECLQGRKKAMRMLKNLLQERQANPRKHETDFFDYVLEELQKNKTILTEEIALDLMFVLLFASFETTSLGLTLAVKFISDHPLVLKELTEEHEGILKNRENANSGLTWKEYKSMKFTFQVINETVRLANIVPGIFRKTLRDIQFKGWAVMVCPPAVHLNPAKYEDPLAFNPWRWKGMEVNGASKTFMAFGGGMRFCVGTEFTKVQMAVFLHCLVTKSRWQAIKGGNIVRTPGLQFPSGYHIQLTERDKRYNSTT

SEQ ID NO: 544 - protein, 460 aa, Vitis vinifera
  misc_feature: Public GI ID no.81239117
  misc_feature: Bit score of 418.7 for HMM based on sequences of FIGURE 7.
  misc_feature (207)..(456): Pfam Name: p450 Pfam Description: Cytochrome P450
  misc_feature: Functional Homolog Of Ceres SEEDLINE ID no. ME06336 at SEQ ID NO. 441
MAVFGVVLIGLCICTALLRWNEVRYRKKGLPPGTMGWPVFGETTEFLKQGPSFMKNQRARYGKFFKSHLLGCPTTVSMDPELNRYILMNEAKGLVPGYPQSMLDILGKCNIAAVHGSTHKYMRGALLALISPTMIRGQLLPKIDEFMRSHLNKWDTKIINIQEKTKEMALLSSLKQIAGIESGTISKEFMPEFFKLVLGTISLPIDLPGTNYRRGFQARKNIVGMLRQLIEERKASQETHNDMLGCLMRTNENRYKLSDEEIIDLIITILYSGYETVSTTSMMAVKYLHDHPRVLDELRKEHLAIRERKRPEDPIDWNDYKLMRFTRAVIFETSRLATIVNGVLRKTTKDMELNGFVIPKGWRIYVYTREINYDPLLYPDPLAFNPWRWLDKSLESQNYFLLFGGGTRQCPGKELGIAEISTFLHYFVTRYRWEEVGGDKLMKFPRVEAPNGLHIRVSAY

SEQ ID NO: 545 - DNA, 1888 bp, Triticum aestivum
  misc_feature: Ceres CLONE ID no.703807
  misc_feature: Encodes the peptide sequence at SEQ ID NO. 546
acaaacccacacacaacccctctgtctcctcctccttggctttgctagcttcctgctcccttcgcttcccacatgcagccatatcttgagctagcttctctccgcatcaccgccaccatcccgctgtccccaagaatatatagcaccatcttcctcgaggccatggctgccatggcctatatagccctccggggcgcggcattggccgccatcgtcgccctcatccattgggtgtacaggtggcgccaccccaaatgcgccggcacgctcccgccgggatccatgggcatccccatcatcggcgagacgctgcagttcttcgcccccaacccgacctgcggcctctcccccttcgtccgggacagggtgaagaggtacgggagcatgttcaagacgagcatcgtggggcggccggtggtggtgtcggcggacccggacgtgaaccrctacgtgttccagaacgaggggaagctgttcgagagctggtacccggacaccttcaccgagatcttcggccgcgacaacgtcggctccctgcacggcttcatctacaagtaccctcaagaccctcgtgctccgcctctacggccagccargagaacctcaaggcggtgctcctcgccgagaccgacgccgcctgccgcggcagcctcgccgcgtgggcggcgcagccctgtgtcgacatcaaagacgggctctccactatgatatttgatcttactgccmagaagctgatcggctacgagccgaccaagtcctcggagagcctgcgggagaatttcacggcgttcattcgcggcctgatctcgttccccctcaacattcccggcacggcctatcacgaatgcatggaggggaggaagaaagcgatgaaggtgctcaagggcatgatgcaggagaggatggcggatccggagaggaagtgcgaggacttcttcgaccacgtgatccaggaactgaggagggagaagccgcttctgacggagaccatcgcgctggacctcatgttcgtgctcctcttcgccagcttcgagaccacggcgctcgccctcaccctcggsgtcaagctgctcaccgagaaccccagagtcgtcgacgcgctaacggaggaacacgaagcgatcgtgaggaacagggaggacccagatgccgcgatcacgtgggccgagtacaagtcgatgaccttcacagctcatgtcatcatggagatcgtcagactcgccaacatcgtgccggggattttccggaaggccttgcaagacgttgagatcaaaggctacacggttccagcgggatggggtatcatggtgtgtccgccggcggtgcacctaaaccctgacatatacgaagatccgctggcgttcaacccatggaggtggcaggacaaacctgaaatcaccggcggaacgaagcatttcatggcgttcggaggcgggcttcggttctgcgtcggaaccgatctcaccaaggtcttgatggcaacattcattcacaatcttgttacgaaatacagatggaagacagtaaaaggagggaacatagtccggacgccgggcctcggcttcccggatggctttgacatccagctcttccctaagaactgacccttttttgatgatatctcgacagtttagtggttgcagttaaacacaagattgttcctgcaaaagatcacattttaggatggaaaaccatatacttagtctagtggtaggatacacattcctagttataactacagtcatattgccgggtaccacctctcatggatccagaatgggttttttgtacttttggctgttcgttttccatgtggttagtcatctatccatgtgttgtgtgtaaatcaatcccatacatctcaaatgagaaagagagcatattaact

SEQ ID NO: 546 - protein, 508 aa, Triticum aestivum
  misc_feature: Ceres CLONE ID no.703807
  misc_feature: Bit score of 440.9 for HMM based on sequences of FIGURE 7.
  misc_feature (245)..(504): Pfam Name: p450 Pfam Description: Cytochrome P450
  misc_feature: Functional Homolog Of Ceres SEEDLINE ID no. ME06336 at SEQ ID NO. 441
MQPYLELASLRITATIPLSPRIYSTIFLEAMAAMAYIALRGAALAAIVALIHWVYRWRHPKCAGTLPPGSMGIPIIGETLQFFAPNPTCGLSPFVRDRVKRYGSMFKTSIVGRPVVVSADPDVNHYVFQNEGKLFESWYPDTFTEIFGRDNVGSLHGFIYKYLKTLVLRLYGQENLKAVLLAETDAACRGSLAAWAAQPCVDIKDGLSTMIFDLTAKKLIGYEPTKSSESLRENFTAFIRGLISFPLNIPGTAYHECMEGRKKAMKVLKGMMQERMADPERKCEDFFDHVIQELRREKPLLTETIALDLMFVLLFASFETTALALTLGVKLLTENPRVVDALTEEHEAIVRNREDPDAAITWAEYKSMTFTAHVIMEIVRLANIVPGIFRKALQDVEIKGYTVPAGWGIMVCPPAVHLNPDIYEDPLAFNPWRWQDKPEITGGTKHFMAFGGGLRFCVGTDLTKVLMATFIHNLVTKYRWKTVKGGNIVRTPGLGFPDGFDIQLFPKN

SEQ ID NO: 547 - protein, 480 aa, Oryza sativa
  misc_feature: Public GI ID no.116310012
  misc_feature: Bit score of 446.1 for HMM based on sequences of FIGURE 7.
  misc_feature (217)..(476): Pfam Name: p450 Pfam Description: Cytochrome P450
  misc_feature: Functional Homolog Of Ceres SEEDLINE ID no. ME06336 at SEQ ID NO. 441
MASSMAYIALLCAALAAVVALLRWAYRWSHPRSNGRLPPGSLGLPVIGETLQFFAPNPTCDLSPFVKERIKRYGSIFKTSVVGRPVVVSADPEMNYYVFQQEGKLFESWYPDTFTEIFGRDNVGSLHGFMYKYLKTLVLRLYGQENLKSVLLAETDAACRGSLASWASQPSVELKEGISTMIFDLTAKKLIGYDPSKPSQVNLRKNFGAFIRGLISFPLNIPGTAYHECMEGRKNAMKVLRGMMKERMAEPERPCEDFFDHVIQELRREKPLLTETIALDLMFVLLFASFETTALALTIGVKLLTENPKVVDALREEHEAIIRNRKDPNSGVTWAEYKSMTFTSQVIMEIVRLANIVPGIFRKALQDVEIKGYTIPAGWGIMVCPPAVHLNPEIYEDPLAFNPWRWQGKPEITGGTKHFMAFGGGLRFCVGTDLSKVLMATFIHALVTKYSWRTVKGGNIVRTPGLSFPDGFHIQLFPKN

SEQ ID NO: 548 - DNA, 1692 bp, Triticum aestivum
  misc_feature: Ceres CLONE ID no.822001
  misc_feature: Encodes the peptide sequence at SEQ ID NO. 549
tagctagctagtgttatccgttagccgatgccgttggctggctttcgatcgatcacacgagacatgtggaaaccacgggcggccatgtattcagttcgtcgttagcgcgcgcgtagcagatagaagatggacgccttggcggggctctcggcccttgccgcggtggcgctgctgctgctgtacagcgtgcaccggtggaggagccctcggtgcaacggccggctcccgccggggtctatgggcctcccgctcgtcggcgagacgttccagttcttctccccggacgcctccttggacatccctcgcttcatccgacacaggctcacgaggtacggcccgatcttcaagacgagcgtggtggggcacccgatggtggtgtcggcggaccaggagctgaaccacatggtgttccagcaggagggggagctgttccagagctggtacccggactcgttcgtggagatcctcggccgcgataacgtcggggagcagaagggcaccatgttcaagtacctcaagaacatagttctcaggtacttcggcccggagagccttaaggagtccatccttggcgacgtcgagcgcgccgtctgcagctcgctctgcacctggtccaccctgccggccgtcgagctcaaagaagccgtctccaccatggtgtttgaactttccgcgagcaagctgctgggcctggagccgtcgaggtccaaggttctacggaagagcttcttcgacttcgtcagagggctcatctccttcccgctctacttgccaggaacagcctactacgcatgcatgcagggacggatgagtgtaatggaggtgctgcagcaggtgctggaggagaggacgagatcggctgaggcggccggaggacgggaagcacggtgccacggcgacttcctggactacgtcgtgcaggagatcaccaaggagaagcctgtcctgacggagggaatggcgctggacctcctgtttgtgctcctcttcgccagcttccacacgacgtcgctggccatcaccctggccgtcaagctcctcaccgagcaccctcgcgtcctggaggagctcacggtggagcatgaaacgattctgaacgagcgtgaggcaggcggcgagtctgatggcgacagagttacatggaaagagtacaaatccatgacattcacatcccaggtgataaacgagacggtccgactggccaacattgcgcctggcatcttcagaaagacactgaaagatgtacagttcagaggatacacaattccagctggatggggagtgatggtctgccctctcgcggtgcaccttaatccagatatttaccctgaccccctcaccttcaatccttcaaggttcaaggataaactagaggcaaaccgtgggttaagacacttcatggctttcggaggaggtctccggtcctgtgttggggcagacttcagcaagctacaaatggccattttccttcactttcttgtcaccaaatataggtggatacaactaggtggaggcaagatagtccggtgtccagggctggaatttcctgatggttacctcattcagatcagacagagagattaatcagcacctgctttcaagtcatgctagcagtaggaaaagcttatatctcacgtgtacaattgttctagcatgttgtttgatgaaataacacttgtgcagaagtattac

SEQ ID NO: 549 - protein, 485 aa, Triticum aestivum
  misc_feature: Ceres CLONE ID no.822001
  misc_feature: Bit score of 446.4 for HMM based on sequences of FIGURE 7.
  misc_feature (213)..(457): Pfam Name: p450 Pfam Description: Cytochrome P450
  misc_feature: Functional Homolog Of Ceres SEEDLINE ID no. ME06336 at SEQ ID NO. 441
MDALAGLSALAAVALLLLYSVHRWRSPRCNGRLPPGSMGLPLVGETFQFFSPDASLDIPRFIRHRLTRYGPIFKTSVVGHPMVVSADQELNHMVFQQEGELFQSWYPDSFVEILGRDNVGEQKGTMFKYLKNIVLRYFGPESLKESILGDVERAVCSSLCTWSTLPAVELKEAVSTMVFELSASKLLGLEPSRSKVLRKSFFDFVRGLISFPLYLPGTAYYACMQGRMSVMEVLQQVLEERTRSAEAAGGREARCHGDFLDYVVQEITKEKPVLTEGMALDLLFVLLFASFHTTSLAITLAVKLLTEHPRVLEELTVEHETILNEREAGGESDGDRVTWKEYKSMTFTSQVINETVRLANIAPGIFRKTLKDVQFRGYTIPAGWGVMVCPLAVHLNPDIYPDPLTFNPSRFKDKLEANRGLRHFMAFGGGLRSCVGADFSKLQMAIFLHFLVTKYRWIQLGGGKIVRCPGLEFPDGYLIQIRQRD

SEQ ID NO: 550 - protein, 404 aa, Arabidopsis thaliana
  misc_feature: Public GI ID no.79327045
  misc_feature: Bit score of 655.1 for HMM based on sequences of FIGURE 7.
  misc_feature (205)..(395): Pfam Name: p450 Pfam Description: Cytochrome P450
  misc_feature: Functional Homolog Of Ceres SEEDLINE ID no. ME06336 at SEQ ID NO. 441
MAFTAFLLLLSSIAAGFLLLLRRTRYRRMGLPPGSLGLPLIGETFQLIGAYKTENPEPFIDERVARYGSVFMTHLFGEPTIFSADPETNRFVLQNEGKLFECSYPASICNLLGKHSLLLMKGSLHKRMHSLTMSFANSSIIKDHLMLDIDRLVRFNLDSWSSRVLLMEEAKKITFELTVKQLMSFDPGEWSESLRKEYLLVIEGFFSLPLPLFSTTYRKAIQARRKVAEALTVVVMKRREEEEEGAERKKDMLAALLAADDGFSDEEIVDFLVALLVAGYETTSTIMTLAVKFLTETPLALAQLKEEHEKIRAMKSDSYSLEWSDYKSMPFTQCVVNETLRVANIIGGVFRRAMTDVEIKGYKIPKGWKVFSSFRAVHLDPNHFKDARTFNPWRWQQLGNDRPF

SEQ ID NO: 551 - protein, 480 aa, Oryza sativa subsp. japonica
  misc_feature: Public GI ID no.125591255
  misc_feature: Bit score of 458.1 for HMM based on sequences of FIGURE 7.
  misc_feature (224)..(476): Pfam Name: p450 Pfam Description: Cytochrome P450
  misc_feature: Functional Homolog Of Ceres SEEDLINE ID no. ME06336 at SEQ ID NO. 441
METLVCVAVWAVAMAMVVASVMWAYRWSHPRANGRLPPGSLGLPLLGETLQFFAPNTTCDISPFVKERLNRYGSIFKTSVVGRPVVVTADPEMNYYVFQQEGKLFESWYPDTFTEIFGRDNVGSLHGFMYKYLKSLVLRLYGQENLRAVLLDETDRACRTSLASWAAQPSVELKDSISAMIFDLTAKKLISYEPSKSSENLRKNFVAFIRGLISFPVDIPGTAYHECMKGRRNAMKVLKKMMRERMEEPGRQCEDFFDVLIEELGREKPVLTEGIALDLMFVLLFASFETTSLALTLGVRLLAENPTVLDALTEEHEAIVRGRKEGCDAAGLTWADYKSMTFTSQVTLEMVRLANIVPGIFRKALQDIEFKGYTIPAGWGVMVCPPAVHLNPEIYEDPLAFNPWRWQDKVEITGGSKHFMAFGGGLRFCVGTDLSKVLIATFIHHLVTKYRWKTVKGGNIVRTPGLSFPDGFHVQFFPKN

SEQ ID NO: 552 - protein, 514 aa, Oryza sativa subsp. japonica
  misc_feature: Public GI ID no.115459998
  misc_feature: Bit score of 442.1 for HMM based on sequences of FIGURE 7.
  misc_feature (251)..(510): Pfam Name: p450 Pfam Description: Cytochrome P450
  misc_feature: Functional Homolog Of Ceres SEEDLINE ID no. ME06336 at SEQ ID NO. 441
MQPYLQLASLRLATTIPLAPRLYDANLLAASGAAMASSMAYIALLCAALAAVVALLRWAYRWSHPRSNGRLPPGSLGLPVIGETLQFFAPNPTCDLSPFVKERIKRYGSIFKTSVVGRPVVVSADPEMNYYVFQQEGKLFESWYPDTFTEIFGRDNVGSLHGFMYKYLKTLVLRLYGQENLKSVLLAETDAACRGSLASWASQPSVELKEGISTMIFDLTAKKLIGYDPSKPSQVNLRKNFGAFICGLISFPLNIPGTAYHECMEGRKNAMKVLRGMMKERMAEPERPCEDFFDHVIQELRREKPLLTETIALDLMFVLLFASFETTALALTIGVKLLTENPKVVDALREEHEAIIRNRKDPNSGVTWAEYKSMTFTSQVIMEIVRLANIVPGIFRKALQDVEIKGYTIPAGWGIMVCPPAVHLNPEIYEDPLAFNPWRWQGKPEITGGTKHFMAFGGGLRFCVGTDLSKVLMATFIHSLVTKYSWRTVKGGNIVRTPGLSFPDGFHIQLFPKN

SEQ ID NO: 553 - protein, 480 aa, Oryza sativa subsp. japonica
  misc_feature: Public GI ID no.38567920
  misc_feature: Bit score of 442.1 for HMM based on sequences of FIGURE 7.
  misc_feature (217)..(476): Pfam Name: p450 Pfam Description: Cytochrome P450
  misc_feature: Functional Homolog Of Ceres SEEDLINE ID no. ME06336 at SEQ ID NO. 441
MASSMAYIALLCAALAAVVALLRWAYRWSHPRSNGRLPPGSLGLPVIGETLQFFAPNPTCDLSPFVKERIKRYGSIFKTSVVGRPVVVSADPEMNYYVFQQEGKLFESWYPDTFTEIFGRDNVGSLHGFMYKYLKTLVLRLYGQENLKSVLLAETDAACRGSLASWASQPSVELKEGISTMIFDLTAKKLIGYDPSKPSQVNLRKNFGAFICGLISFPLNIPGTAYHECMEGRKNAMKVLRGMMKERMAEPERPCEDFFDHVIQELRREKPLLTETIALDLMFVLLFASFETTALALTIGVKLLTENPKVVDALREEHEAIIRNRKDPNSGVTWAEYKSMTFTSQVIMEIVRLANIVPGIFRKALQDVEIKGYTIPAGWGIMVCPPAVHLNPEIYEDPLAFNPWRWQGKPEITGGTKHFMAFGGGLRFCVGTDLSKVLMATFIHSLVTKYSWRTVKGGNIVRTPGLSFPDGFHIQLFPKN

SEQ ID NO: 554 - DNA, 1655 bp, Triticum aestivum
  misc_feature: Ceres CLONE ID no.923599
  misc_feature: Encodes the peptide sequence at SEQ ID NO. 555
acccgatgcgcctggctggctttcgattgatcacacgagacatgtagaaaccacatgcgtttccaacctagttagatagaaggatggacgccttggcggggctctcggcctttgccgcggtggcgctgccgctcctcctgctgtacagcgtgcaccggtggaggaaccctcggtgcaacggccggctcccgccggggtccatgggcctcccgctcgtcggcgagacgttccagttcttctccccggacgcctccttggacgtccctcgcttcatccgagacaggctcacgaggtacggcccgatcttcaagacgagcgtggtggggcacccggtggtggtgtcggcggacgaggagctgaaccacatggtgttccagcaggagggggagctgttccagagctggtacccggactcgttcgtggagatcctcggccgcgacaacgtcggggagcagaagggcaccatgttcaagtacctcaagaacatggtgctcaggttcttcggcccggagagcctcaaggagtccatcctccgcgacgtccagcgcgccgtctgcagctcgctctgcacctggtccaccctgccggccgtcgacctcaaagaagccgtctccaccatggtgtttgaactttcggcgagcaagctgctcggcctggagccgtcgaggtccaaggttctacggaagagcttcttcgacttcgttctagggctcatctccttcccgctctacctgccaggaacagcctactacgcatgcatgcagggacggatgagtgtaatggaggtgctgcagcaggtgttggaggagaggacgagatcagctgaggcggccggaggaggggaagcacggtgccacggcgacttcctggactacgtcgtccaggagatcaccaaggagaagccggtcctgacggagggaatggcgctggacctcctgtttgtgctcctcttcgccagcttccacaccacgtcgctggccatcaccctggccgtcaagctcctcaccgacaaccctcgcgtcctggaggaactcacggtggagcatgaaacgattctgaacgagcgtgaggcaggcggtgagactgatggcgacagacttacatggaaagagtacaaatccatgacattcacatcccaggtgataaacgagacggtccgactggccaacattgcgcctggcatcttcagaaagacactgaaagatgtacagttcagagtctacacaattccagctggatggggagtgatggtctgccctctcgcggtgcacctgaatccagatatttaccctgaccccctcaccttcaatccttcaaggtttaaggataaactagaggcaaaccgtgggtcaagacacttcatggctttcggaggaggtctccggtcctgtgttggagcagacttcagcaagctacaaatggccattttccttcactttcttgtcaccaaatataggtggatacaactaggtggaggcaagatagtccggtgtccagggctggaatttcctgatggttacctcattcagattagacagagagactaatcaacacctgctttcaagtcatgctagcagtaggaaaagcttatatcacacgtgtacaattgttctagcatgttgtttgatgaaataacagttgtgcagaagtattat

SEQ ID NO: 555 - protein, 487 aa, Triticum aestivum
  misc_feature: Ceres CLONE ID no.923599
  misc_feature: Bit score of 449.2 for HMM based on sequences of FIGURE 7.
  misc_feature (202)..(459): Pfam Name: p450 Pfam Description: Cytochrome P450
  misc_feature: Functional Homolog Of Ceres SEEDLINE ID no. ME06336 at SEQ ID NO. 441
MDALAGLSAFAAVALPLLLLYSVHRWRNPRCNGRLPPGSMGLPLVGETFQFFSPDASLDVPRFIRDRLTRYGPIFKTSVVGHPVVVSADEELNHMVFQQEGELFQSWYPDSFVEILGRDNVGEQKGTMFKYLKNMVLRFFGPESLKESILRDVQRAVCSSLCTWSTLPAVDLKEAVSTMVFELSASKLLGLEPSRSKVLRKSFFDFVLGLISFPLYLPGTAYYACMQGRMSVMEVLQQVLEERTRSAEAAGGGEARCHGDFLDYVVQEITKEKPVLTEGMALDLLFVLLFASFHTTSLAITLAVKLLTDNPRVLEELTVEHETILNEREAGGETDGDRLTWKEYKSMTFTSQVINETVRLANIAPGIFRKTLKDVQFRVYTIPAGWGVMVCPLAVHLNPDIYPDPLTFNPSRFKDKLEANRGSRHFMAFGGGLRSCVGADFSKLQMAIFLHFLVTKYRWIQLGGGKIVRCPGLEFPDGYLIQIRQRD

SEQ ID NO: 556 - protein, 469 aa, Oryza sativa subsp. japonica
  misc_feature: Public GI ID no.115454045
  misc_feature: Bit score of 418.6 for HMM based on sequences of FIGURE 7.
  misc_feature (218)..(465): Pfam Name: p450 Pfam Description: Cytochrome P450
  misc_feature: Functional Homolog Of Ceres SEEDLINE ID no. ME06336 at SEQ ID NO. 441
MVLVAIGVVVAAAVVVSSLLLRWNEVRYSRKRGLPPGTMGWPLFGETTEFLKQGPSFMKARRLRYGSVFRTHILGCPTVVCMEAELNRRALASEGRGFVPGYPQSMLDILGRNNIAAVQGPLHRAMRGAMLSLVRPAMIRSSLLPKIDAFMRSHLAAWSSSSSSAVVDIQAKTKEMALLSALRQIAGVSAGPLSDALKAELYTLVLGTISLPINLPGTNYYQGFKARKKLVAMLEQMIAERRSSGQVHDDMLDALLTGVEGTREKLTDEQIIDLIITLIYSGYETMSTTSMMAVKYLSDHPKALEQLRKEHFDIRKGKAPEDAIDWNDFKSMTFTRAVIFETLRLATVVNGLLRKTTQDVEMNGYVIPKGWRIYVYTREINYDPFLYPDPMTFNPWRWLEKNMESHPHFMLFGGGSRMCPGKEVGTVEIATFLHYFVTQYRWEEEGNNTILKFPRVEAPNGLHIRVQDY

SEQ ID NO: 557 - protein, 484 aa, Oryza sativa
  misc_feature: Public GI ID no.116310273
  misc_feature: Bit score of 421.9 for HMM based on sequences of FIGURE 7.
  misc_feature (234)..(480): Pfam Name: p450 Pfam Description: Cytochrome P450
  misc_feature: Functional Homolog Of Ceres SEEDLINE ID no. ME06336 at SEQ ID NO. 441
MYAYVGLVGAAAALVLLLRHQARRWRNPRCGGQLPPGSMGLPLVGETFQFFSSDASLDIPPFIRHRLARYGPIFKTSLVGHPVVVSADEELNHMVFQQEGQLFQSWYPDSFVEILGKDNVGEQQGAMFRYLKNMVLRYFGPESLKEGIIRDVERAVSSSLCTWSTLPAVELKEAVSTMVFDLAASKLLGLEPSRSKILRKSFFDFVRGLISFPLYLPGTAYYSCMQGRRRAMVVLEQVLEERKQSTGLQRGGEAQQHGDFLDYVIQEITKEKPVMTEKMALDLMFVLLFASFHTTSLALTLAVKLLADHPLVLEELTVEHETILKDREAGSELDRITWKEYKSMAFTSQVINETVRLANIAPVIFRKALKDIRFNGYTIPAGWGVMVCPPAVHLNPYIYPDPLTFIPSRFKDKPEINRGSKHFMAFGGGLRFCVGADFSKLQLAIFLHFLVTKYRWIPLGASRVVRTPGLEFPDGYRIKVIQRH

SEQ ID NO: 558 - DNA, 1350 bp, Populus balsamifera subsp. trichocarpa
  misc_feature: Ceres ANNOT ID no.1540583
  misc_feature: Encodes the peptide sequence at SEQ ID NO. 559
atggtgatgatgatgatcaaatcatcatcaatgtacgaaaaaaccttacttcctttaggcgctcttggatggccctttatcggcgaaaccatcgacttcgtttcctgtgcttactcagaccgccctgaaagcttcatggataaacgtcgtcgcatgtatgggaaggtgttcaagtcacatatatttggaagtcctacaatagtatcaacagatgcagaagtgagcaaatttatactacaaagtgatgcaaggttgttcgttccttcttacccgaaatctctcactgagttgatgggaaaatcttcaattttgctcatcaatgggagcttacaaaggagaattcatggactcataggtgccttcttcaagtcacctcatctcaaagctcaaatcactcgagacatgcaaagttatgttcaagaatcaatggagaaatggagagaagaccaccccattttcatacaagatgaaaccaagaatgcattgattagtttggatcctggtgaagaaatggagttgctaaaaaaacagttccaagaattcattgcagggctcatgtctttacctttaaaaaacattcctggaagccaactttatcgatcattacaggcaaagaaaaaaatggtgaagttagtgcaaaaaattatcaaatctaagagagatcatgggatgatttcaatggtaccaaaagatttagtgcaagtgttgcttaacgatgcaagcgaacaactaacagatgatttgatagctgataatatgatcgacatgatgatacctggcgaagattcagtcccagtccttatgactcttgctgttaaatacctttcagactgccctcctgcgctacaccaattgacggaggagaacatgaaattgaaaagtctcaaagctcagcatggggagccgatgtgctggagtgattatttatctctaccctttacacaaacagtgattacagaaaccctaagaatggggaacattataattggggtgatgagaaaggcgatgaaggacatagagattaaagggtatttgatacccaaaggatggtgtgcttttgcatacttcagatcagttcatcttgatgaaaacaactatgagtggccttaccagttcaatccatggaggtggcaagacaaggatatgagcaatagtagcttcactccatttggaggaggacaaagattatgtcctggacttgacttggccaggctggaagcttcaattttcttgcaccactttgtcacccagtttagatgggtggctgaggacgatactattgtaaatttccctactgtgaggatgaagagaagaatgccgatttgggtcaaaaggagaggagaaaattaa

SEQ ID NO: 559 - protein, 446 aa, Populus balsamifera subsp. trichocarpa
  misc_feature: Ceres ANNOT ID no.1540583
  misc_feature: Bit score of 717.1 for HMM based on sequences of FIGURE 7.
  misc_feature (301)..(417): Pfam Name: p450 Pfam Description: Cytochrome P450
  misc_feature: Functional Homolog Of Ceres SEEDLINE ID no. ME06336 at SEQ ID NO. 441
MMIKSSSMYEKTLLPLGALGWPFIGETIDFVSCAYSDRPESFMDKRRRMYGKVFKSHIFGSPTIVSTDAEVSKFILQSDARLFVPSYPKSLTELMGKSSILLINGSLQRRIHGLIGAFFKSPHLKAQITRDMQSYVQESMEKWREDHPIFIQDETKNALISLDPGEEMELLKKQFQEFIAGLMSLPLKNIPGSQLYRSLQAKKKMVKLVQKIIKSKRDHGMISMVPKDLVQVLLNDASEQLTDDLIADNMIDMMIPGEDSVPVLMTLAVKYLSDCPPALHQLTEENMKLKSLKAQHGEPMCWSDYLSLPFTQTVITETLRMGNIIIGVMRKAMKDIEIKGYLIPKGWCAFAYFRSVHLDENNYEWPYQFNPWRWQDKDMSNSSFTPFGGGQRLCPGLDLARLEASIFLHHFVTQFRWVAEDDTIVNFPTVRMKRRMPIWVKRRGEN

SEQ ID NO: 560 - protein, 486 aa, Oryza sativa subsp. japonica
  misc_feature: Public GI ID no.115460002
  misc_feature: Bit score of 424.5 for HMM based on sequences of FIGURE 7.
  misc_feature (236)..(482): Pfam Name: p450 Pfam Description: Cytochrome P450
  misc_feature: Functional Homolog Of Ceres SEEDLINE ID no. ME06336 at SEQ ID NO. 441
MYAYVGLVGGAAALVLLLLLRHQARRWRNPRCGGQLPPGSMGLPLVGETFQFFSSDASLDIPPFIRHRLARYGPIFKTSLVGHPVVVSADEELNHMVFQQEGQLFQSWYPDSFVEILGKDNVGEQQGAMFRYLKNMVLRYFGPESLKEGIIRDVERAVSSSLCTWSTLPAVELKEAVSTMVFDLAASKLLGLEPSRSKILRKSFFDFVRGLISFPLYLPGTAYYSCMQGRRRAMVVLEQVLEERKQSTGLQRGGEAQQHGDFLDYVIQEITKEKPVMTEKMALDLMFVLLFASFHTTSLALTLAVKLLADHPLVLEELTVEHETILKDREAGSELDRITWKEYKSMAFTSQVINETVRLANIAPVIFRKALKDIRFNGYTIPAGWGVMVCPPAVHLNPYIYPDPLTFIPSRFKDKPEINRGSKHFMAFGGGLRFCVGADFSKLQLAIFLHFLVTKYRWIPLGASRVVRTPGLEFPDGYRIKVIQRH

SEQ ID NO: 561 - DNA, 1476 bp, Populus balsamifera subsp. trichocarpa
  misc_feature: Ceres ANNOT ID no.1536422
  misc_feature: Encodes the peptide sequence at SEQ ID NO. 562
atgagagaaatttattcggcaacacttatgatctcgtccatcttattcatcgtttttcttgtacaattgcttgtatgcaagaagaagagcaaggaaaagacatcgtacaaattgccaccaggtagaagaggctggccattgattggtgatagcttcaactggttcaatgctgttgctggttctcatccccctcaatttgttcaccaacaagtcaataggtttggtaagatattctcatgcagtttgttcggaaaatgggctgtggtatcagcagacccgacctttaaccggtttataatgcaaaatgaaggcaaattgtttcaatcaagttatccaaaatcttttagagatttggttgggaaaaatggggtgatcacagtccacggagagcaacaacgaaaacttcatggaattgcatctaatatgatgcgtctagagaagctcaagttccatttcttggataatattcaattgattatgcttcaaactttgaacaaacttgacaacaaccaagtcattcttctccaagatgtttgcagaaaggcgagtagtgctctagtagctattaatctgatggtgaatcaactacttggggcatcaagtgagacagaaattaacgagatggctcacttcttctctgactttgtcgatggttgtctatctcttcccataaatattcctggttttgcctaccacactgccatgaaggcaagggagaaaattataagaaagataaacaagacaatagagaagcacgggcaagaagagtcatcagaaggtagtaatggggtgcttggaaggcttttagaggaagaaagtttgcctgataatgcagtagcagactttattatcaatctcctttttgctgggaatgaaacaacagctaaaaccatgctttttgctgtttatttcctcactcggtgtccaaaagcaatgcagcaactactggatgaacaagatagtataaggagtaattctagtggagagggaatgctaacatggcaagattacaaagcaatgtcttttactcagtgtgttattgatgaaacgcttcgactcggggggattgcaatatggctaatgagggaggccaagcaagatgtggtataccaagattatgtaattccgaaagggtgctttgtggttccatttctttcagcggttcacttggatgaaaatttgtacaagggagctagcaccttccatccttggagatggatggagcctgaaaatcaagaaaagagaaattggagaagtagcccattctactgtccctttggaggaggtgctcggttttgtccaggagcagagttgtctcgtctccaaattgctatctttcttcactactttgttactacatttacatggacgcagctcaaggaagacaggatgtccttctttccatcagctcgcttggttaatggtttccaaattcgtttgacaagccgccatcatctcgactcagaatcgttgtaa

SEQ ID NO: 562 - protein, 491 aa, Populus balsamifera subsp. trichocarpa
  misc_feature: Ceres ANNOT ID no.1536422
  misc_feature: Bit score of 450.8 for HMM based on sequences of FIGURE 7.
  misc_feature (270)..(480): Pfam Name: p450 Pfam Description: Cytochrome P450
  misc_feature: Functional Homolog Of Ceres SEEDLINE ID no. ME06336 at SEQ ID NO. 441
MREIYSATLMISSILFIVFLVQLLVCKKKSKEKTSYKLPPGRRGWPLIGDSFNWFNAVAGSHPPQFVHQQVNRFGKIFSCSLFGKWAVVSADPTFNRFIMQNEGKLFQSSYPKSFRDLVGKNGVITVHGEQQRKLHGIASNMMRLEKLKFHFLDNIQLIMLQTLNKLDNNQVILLQDVCRKASSALVAINLMVNQLLGASSETEINEMAHFFSDFVDGCLSLPINIPGFAYHTAMKAREKIIRKINKTIEKHGQEESSEGSNGVLGRLLEEESLPDNAVADFIINLLFAGNETTAKTMLFAVYFLTRCPKAMQQLLDEQDSIRSNSSGEGMLTWQDYKAMSFTQCVIDETLRLGGIAIWLMREAKQDVVYQDYVIPKGCFVVPFLSAVHLDENLYKGASTFHPWRWMEPENQEKRNWRSSPFYCPFGGGARFCPGAELSRLQIAIFLHYFVTTFTWTQLKEDRMSFFPSARLVNGFQIRLTSRHHLDSESL

SEQ ID NO: 563 - protein, 464 aa, Arabidopsis thaliana
  misc_feature: Public GI ID no.9294019
  misc_feature: Bit score of 616.8 for HMM based on sequences of FIGURE 7.
  misc_feature (356)..(464): Pfam Name: p450 Pfam Description: Cytochrome P450
  misc_feature: Functional Homolog Of Ceres SEEDLINE ID no. ME06336 at SEQ ID NO. 441
MDTSSSLLFFSFFFFIIIVIFNKINGLRSSPASKKKLNDHHVTSQSHGPKFPHGSLGWPVIGETIEFVSSAYSDRPESFMDKRRLMYGRVFKSHIFGTATIVSTDAEVNRAVLQSDSTAFVPFYPKTVRELMGKSSILLINGSLHRRFHGLVGSFLKSPLLKAQIVRDMHKFLSESMDLWSEDQPVLLQDVSKTVAFKVLAKALISVEKGEDLEELKREFENFISGLMSLPINFPGTQLHRSLQAKKNMVKQVERIIEGKIRKTKNKEEDDVIAKDVVDVLLKDSSEHLTHNLIANNMIDMMIPGHDSVPVLITLAVKFLSDSPAALNLLTEENMKLKSLKELTGEPLYWNDYLSLPFTQKVITETLRMGNVIIGVMRKAMKDVEIKGYVIPKGWCFLAYLRSVHLDKLYYESPYKFNPWRWQERDMNTSSFSPFGGGQRLCPGLDLARLETSVFLHHLVTRFR

SEQ ID NO: 564 - protein, 482 aa, Oryza sativa
  misc_feature: Public GI ID no.116310272
  misc_feature: Bit score of 398.2 for HMM based on sequences of FIGURE 7.
  misc_feature (288)..(479): Pfam Name: p450 Pfam Description: Cytochrome P450
  misc_feature: Functional Homolog Of Ceres SEEDLINE ID no. ME06336 at SEQ ID NO. 441
MEKSELLLGSYSYAALCGVTLIIGWLAHWIYKWMNPPCIGRLPPGSMGFPIIGETFQFFRASPSIDMPSYYKQRLERYGPLFKTSLVGRPVIISLDPEVNRFIFQQEGKLFQSWYPETAINIFGKKSLTTYNGTIHKFIRGVAAKLFGLENLKESLLPELENSMRESFASWTGKPSVEVQDGVSDMIFDLVAKKLIGLDVTNSRELRKNFQDFFQGMVSFPIYFPGTSFYRSMQGRRNVRNTLTDIMKERLSAPGKKYGDLVDLIVEELQSEKPMIDENFAIDALAALLFTSFATLSSTLTVAFKYLTDNPKVVEELKEEHGTILKKREGVNSGFTWEEYRSLKFSTQVMNEITRISNVTPGVFRKTLTDVQVKGYTIPSGWLVMISPMAVHLNPKLFEDPLKFDPWRWREEKRSSMLKNYMPFGGGVRLCLGAEFSKLFIALFLHILVTEYSWTEIEGGEVLRISEIMFPQGYHIQLVPQT

SEQ ID NO: 565 - protein, 482 aa, Oryza sativa subsp. japonica
  misc_feature: Public GI ID no.115460000
  misc_feature: Bit score of 398.0 for HMM based on sequences of FIGURE 7.
  misc_feature (288)..(479): Pfam Name: p450 Pfam Description: Cytochrome P450
  misc_feature: Functional Homolog Of Ceres SEEDLINE ID no. ME06336 at SEQ ID NO. 441
MEKSELLLGSYSYAALCGVTLIIGWLAHWVYKWMNPPCIGRLPPGSMGFPIIGETFQFFRASPSIDMPSYYKQRLERYGPLFKTSLVGRPVIISLDPEVNRFIFQQEGKLFQSWYPETAINIFGKKSLTTYNGTIHKFIRGVAAKLFGLENLKESLLPELENSMRESFASWTGKPSVEVQDGVSDMIFDLVAKKLIGLDVTNSRELRKNFQDFFQGMVSFPIYFPGTSFYRSMQGRRNVRNTLTDIMKERLSAPGKKYGDLVDLIVEELQSEKPMIDENFAIDALAALLFTSFATLSSTLTVAFKYLTDNPKVVEELKEEHGTILKKREGVNSGFTWEEYRSLKFSTQVMNEITRISNVTPGVFRKTLTDVQVKGYTIPSGWLVMISPMAVHLNPKLFEDPLKFDPWRWREEKRSSMLKNYMPFGGGVRLCLGAEFSKLFIALFLHILVTEYSWTEIEGGEVLRISEIMFPQGYHIQLVPQT

SEQ ID NO: 566 - protein, 464 aa, Solanum lycopersicum
  misc_feature: Public GI ID no.5921933
  misc_feature: Bit score of 406.5 for HMM based on sequences of FIGURE 7.
  misc_feature (211)..(461): Pfam Name: p450 Pfam Description: Cytochrome P450
  misc_feature: Functional Homolog Of Ceres SEEDLINE ID no. ME06336 at SEQ ID NO. 441
MAFFLIFLSSFFGLCIFCTALLRWNQVKYNQKNLPPGTMGWPLFGETTEFLKLGPSFMKNQRARYGSFFKSHILGCPTIVSMDSELNRYILVNEAKGLVPGYPQSMIDILGKCNIAAVNGSAHKYMRGALLSLISPTMIRDQLLPKIDEFMRSHLTNWDNKVIDIQEKTNKMAFLSSLKQIAGIESTSLAQEFMSEFFNLVLGTLSLPINLPNTNYHRGFQARKIIVNLLRTLIEERRASKEIQHDMLGYLMNEEATRFKLTDDEMIDLIITILYSGYETVSTTSMMAVKYLHDHPKVLEELRKEHMAIREKKKPEDPIDYNDYRSMRFTRAVILETSRLATIVNGVLRKTTQDMEINGYIIPKGWRIYVYTRELNYDPRLYPDPYSFNPWRWMDKSLEHQNSFLVFGGGTRQCPGKELGVAEISTFLHYFVTKYRWEEIGGDKLMKFPRVEAPNGLRIRVSAH

SEQ ID NO: 567 - protein, 490 aa, Oryza sativa subsp. indica
  misc_feature: Public GI ID no.125549395
  misc_feature: Bit score of 407.4 for HMM based on sequences of FIGURE 7.
  misc_feature (240)..(486): Pfam Name: p450 Pfam Description: Cytochrome P450
  misc_feature: Functional Homolog Of Ceres SEEDLINE ID no. ME06336 at SEQ ID NO. 441
MYAYVGLVGAAAALVLLLRHQARRWRNPRCGGQLPPGSMGLPLVGETFQFFSSDASLDIPPFIRHRLASLGCKFRYGPIFKTSLVGHPVVVSADEELNHMVFQQEGQLFQSWYPDSFVEILGKDNVGEQQGAMFRYLKNMVLRYFGPESLKEGIIRDVERAVSSSLCTWSTLPAVELKEAVSTMVFDLAASKLLGLEPSRSKILRKSFFDFVRGLISFPLYLPGTAYYSCMQGRRRAMVVLEQVLEERKQSTGLQRGGEAQQHGDFLDYVIQEITKEKPVMTEKMALDLMFVLLFASFHTTSLALTLAVKLLADHPLVLEELTVEHETILKDREAGSELDRITWKEYKSMAFTSQVINETVRLANIAPVIFRKALKDIRFNGYTIPAGWGVMVCPPAVHLNPYIYPDPLTFIPSRFKDKPEINRGSKHFMAFGGGLRFCVGADFSKLQLAIFLHFLVTKYRWIPLGASRVVRTPGLEFPDGYRIKVIQRH

SEQ ID NO: 568 - DNA, 1833 bp, Zea mays
  misc_feature: Ceres CLONE ID no.460186
  misc_feature: Encodes the peptide sequence at SEQ ID NO. 569
gcaaccaaagcacacccctcctccttgctctgccgtgctcggagttgggagttggagcaccaccaccaccactcttcccctctcctctccctcctcgctcgtcctgttggaagcagcacacacacgagagagaaagagagacacaaggagatggcgctgctgttgctcctgctggccgtgctcggcgtggtgctggcgagcagcctgctgctgcggtggaacgagctgcggtacagccgccgccggggcctgccgccgggcacaatggggtggccgctcttcggcgagaccaccgagttcctcaagcaggggcctagcttcatgaagcagaggaggctcaggtacgggagcctgttccggacgcacatcctgggctgccccacggtggtgtgcatggagccggagctgaaccggcgggcgctggccagcgagggcgccggcttcgtcccgggctacccgcagtccatgctcgacatcctggggcccaacaacatcgccgccgtgcacggcccgctccaccgcgccatgcggggcgccatgctcgcgctcacgcggccacacatgatccgcgccgcgctcctccccaagatcgacgccttcatgcgcgcccacctccacggctgggccggacgccgcgtcgacatccaggagatgaccaaggagatggctttgctctcggctctcaggcagatcgctggcatctctgcgggcccacactccgacgccctaaaggcagagctgtacacccttgtacttggcaccttctccctgccaatcaacgtcccaggaaccaactacagcaaagggctccaggcaaggaagaagctcgtggcaatgctgcggcagatgatcgctgaccggaggtcctctggctgcgcccgagacgacatgctggacgcgctgctcagcggcaacgagggtaccagggcgaagctcagcgacgaccagatcatcgaccttctcatcaccctcatatactctgggtacgagactgtgtcgaccacctcgatgatggcggtgaagtacctgtcggacaaccccaaagctctcggacagatcaggaaagagcaccttgacatcaggaaggctaagtcaccggaggatccccttgactggaacgactacaagtccatgaccttcaccaaagctgtcatttatgagactctaaggctagctacagtagtcaacgggctgctgaggaaaactacccatgacgtagaaatgaatgggtatgttattccaaaaggctggagaatttatgtatacacaagggagataaactacgacccgttcctgtacccggaacccatggttttcaacccatggagatggatggagacgaacctggaatcacatccgcacttcatgctgttcggaggaggtgcccgcatgtgcccagggaaggaagtaggaacagttgaaatcgcaacgttccttcactatttcgtgacgcgttacagatgggaggaggagggaaacaacacaatatcgaagttccccagagtggcggctcccaatgggctacatatccgagttcaagattactgaacttcgtgaggcgttttgtgaagtttaggtagggattcagacagatagaaataacccatgcgatgctgatgctgctggcctcttcgaaaggactagaacagccattagtgcctgtaaaatgtgtccatgccgatagtaatgttattatagggaggatataggtatcataggtttattagaaatttgatgtagaaagccaacagatgctcctgtattcttttgctccatcaaaacagaggtatcatttggcttctatgcttttgaatcgaacatggtacagaaccc

SEQ ID NO: 569 - protein, 465 aa, Zea mays
  misc_feature: Ceres CLONE ID no.460186
  misc_feature: Bit score of 412.5 for HMM based on sequences of FIGURE 7.
  misc_feature (211)..(461): Pfam Name: p450 Pfam Description: Cytochrome P450
  misc_feature: Functional Homolog Of Ceres SEEDLINE ID no. ME06336 at SEQ ID NO. 441
MALLLLLLAVLGVVLASSLLLRWNELRYSRRRGLPPGTMGWPLFGETTEFLKQGPSFMKQRRLRYGSLFRTHILGCPTVVCMEPELNRRALASEGAGFVPGYPQSMLDILGPNNIAAVHGPLHRAMRGAMLALTRPHMIRAALLPKIDAFMRAHLHGWAGRRVDIQEMTKEMALLSALRQIAGISAGPHSDALKAELYTLVLGTFSLPINVPGTNYSKGLQARKKLVAMLRQMIADRRSSGCARDDMLDALLSGNEGTRAKLSDDQIIDLLITLIYSGYETVSTTSMMAVKYLSDNPKALGQIRKEHLDIRKAKSPEDPLDWNDYKSMTFTKAVIYETLRLATVVNGLLRKTTHDVEMNGYVIPKGWRIYVYTREINYDPFLYPEPMVFNPWRWMETNLESHPHFMLFGGGARMCPGKEVGTVEIATFLHYFVTRYRWEEEGNNTISKFPRVAAPNGLHIRVQDY

SEQ ID NO: 570 - DNA, 2095 bp, Triticum aestivum
  misc_feature: Ceres CLONE ID no.570049
  misc_feature: Encodes the peptide sequence at SEQ ID NO. 571
gcccactagcactggagtattttggtgccttgcgtgtaaaatttctggtgctcccgtcttcttgatcccctccctccatggtcaagacctcaccttggaatggggaccctcatcggaaaagtaatggtcgtccatttttacaacgaggggtggataatcttctcctccttctcctcctccctgtataaaagggcctcctcctctgcccaactcatccagagcaacacttgttgccaagacagacaccagtctgctctgccctgcctcttgaaccaaaacagagcatccaagaggaggcagagagaggtagaagaagaagtagaagatggcgctcctcctccttgtgctggtcggcgttgtggtcggcgtggtgctggcgagcagcctgctgctgcgctggaacgaggtcaggtacggcaacggcaggaggaaggatggcgatggctgcttgccgccggggacaatgggctggccgctgttcggcgagaccaccgagttcctcaagcagggccccagcttcatgaagcagaggaggctcaggtacgggaggctgttccggacgcacatcctggggtgccccacggtggtgtgcatggacccggagctcaaccgccgcatgctgctgcagggcgagtccggcggcctcgtccccggctacccgcagtccatgctcgacatcctcggccgcaacaacatcgccgccgtgcacggcccgctccaccgcctcatgcgcggcgccatgctcggcctcgtccgccccgccgcgctccgcaccagcctcctccccaagatcgacgccttcatgcgcgaccacctccatggatgggcaggcagtgtcgtcgacgtccaggccaagaccaaggagatggccttgctgtccgcactccagcagatcgccggcatcacggctggcccactctctgacgccctcaaaacagagctatgcagcctggtgctcggcaccatctcgttgccgatcaaccttccgggaaccagctactaccagggcttccaggcaaggacgaagcttgtgtccatgctagagcagatgatcgcggagcggcggtcctctggtgatgctcacgatgacatgctggatgctctcttgagaagcggcgacgatgggacccgggagaaactcactgatgagcagatcatcgacttgctcatcgccctcatctactctggatacgagacgatgtcgaccacttcgatgatggctgtcaagtacctgtcggaccacccgcgagctcttgatgaactcaggagagagcatcttgatatcaggaaggggaaatcgccggaggaagccatcagttatgaagatttgaagtccatggccttcactcgagctgtcatttctgagacactaagattagctacagtcgtcaatgggctcctgaggaaaacaactcaggatgtggaaatgaatgggtatgtcattccaaaagggtggagaatctatgtttacaccagggagataaactacgacccattcatgtatcctgacccgatgactttcaatccgtggaggtggctggagaagaacatggaatcgcacccgcacttcatgttgttcggaggaggcggccggatgtgccccggaaaggaggtgggcacggccgagatcgcgacttttctccactatttcgtgacccgatacagatggcaggaagaaggcaagaacacgatcttgaaattcccccgggtggaggctcccaacgggttacatatccgagttcaagattactgattttgcaacatacattttgcagagtttaggtagatagggcccagactgaggcgacgagagtgcgattctgcaccgacggaaagattagatcagccttgtaagaaaataggaaacataggtatagtgtaggtattataggtttagtaggcaattgacgtagaaggccacaagaggcaactatgttcttccttgtgatcaattacatatgcatgataagcatcacaaaatatatgtgatatgtctggtgacttgaatctgataagcagttatacatatatgtgtatatctggtgccttgaatcgatgataagcagcaccatatatacgagatatgaggtgactt

SEQ ID NO: 571 - protein, 475 aa, Triticum aestivum
  misc_feature: Ceres CLONE ID no.570049
  misc_feature: Bit score of 396.4 for HMM based on sequences of FIGURE 7.
  misc_feature (223)..(471): Pfam Name: p450 Pfam Description: Cytochrome P450
  misc_feature: Functional Homolog Of Ceres SEEDLINE ID no. ME06336 at SEQ ID NO. 441
MALLLLVLVGVVVGVVLASSLLLRWNEVRYGNGRRKDGDGCLPPGTMGWPLFGETTEFLKQGPSFMKQRRLRYGRLFRTHILGCPTVVCMDPELNRRMLLQGESGGLVPGYPQSMLDILGRNNIAAVHGPLHRLMRGAMLGLVRPAALRTSLLPKIDAFMRDHLHGWAGSVVDVQAKTKEMALLSALQQIAGITAGPLSDALKTELCSLVLGTISLPINLPGTSYYQGFQARTKLVSMLEQMIAERRSSGDAHDDMLDALLRSGDDGTREKLTDEQIIDLLIALIYSGYETMSTTSMMAVKYLSDHPRALDELRREHLDIRKGKSPEEAISYEDLKSMAFTRAVISETLRLATVVNGLLRKTTQDVEMNGYVIPKGWRIYVYTREINYDPFMYPDPMTFNPWRWLEKNMESHPHFMLFGGGGRMCPGKEVGTAEIATFLHYFVTRYRWQEEGKNTILKFPRVEAPNGLHIRVQDY

SEQ ID NO: 572 - protein, 492 aa, Oryza sativa subsp. japonica
  misc_feature: Public GI ID no.38567916
  misc_feature: Bit score of 410.0 for HMM based on sequences of FIGURE 7.
  misc_feature (242)..(488): Pfam Name: p450 Pfam Description: Cytochrome P450
  misc_feature: Functional Homolog Of Ceres SEEDLINE ID no. ME06336 at SEQ ID NO. 441
MYAYVGLVGGAAALVLLLLLRHQARRWRNPRCGGQLPPGSMGLPLVGETFQFFSSDASLDIPPFIRHRLASLGCKFRYGPIFKTSLVGHPVVVSADEELNHMVFQQEGQLFQSWYPDSFVEILGKDNVGEQQGAMFRYLKNMVLRYFGPESLKEGIIRDVERAVSSSLCTWSTLPAVELKEAVSTMVFDLAASKLLGLEPSRSKILRKSFFDFVRGLISFPLYLPGTAYYSCMQGRRRAMVVLEQVLEERKQSTGLQRGGEAQQHGDFLDYVIQEITKEKPVMTEKMALDLMFVLLFASFHTTSLALTLAVKLLADHPLVLEELTVEHETILKDREAGSELDRITWKEYKSMAFTSQVINETVRLANIAPVIFRKALKDIRFNGYTIPAGWGVMVCPPAVHLNPYIYPDPLTFIPSRFKDKPEINRGSKHFMAFGGGLRFCVGADFSKLQLAIFLHFLVTKYRWIPLGASRVVRTPGLEFPDGYRIKVIQRH

SEQ ID NO: 573 - DNA, 1599 bp, Glycine max
  misc_feature: Ceres CLONE ID no.624504
  misc_feature: Encodes the peptide sequence at SEQ ID NO. 574
aactacaacacaagagactgtaccttctttttgaagtctctgtgggttggggttttggagtgggagcaccaatggctttcttgatggcaattgtagtagtaggtgttgtcttggtgctctgtttttgctctgctctcttgaggtggaatgaagtaaggtacaggaagaaaggtttgcctcctggcacaatgggttggccactttttggggagacaactgagtttcttaagcagggtccaaacttcatgaaaacccagagagcaaggtatggcagttttttcaaatcccacatactgggttgtcctaccattgtttccatggatccagagcttaacagatacatcctaatgaatgaggcaaaagggcttgttcctggttaccctcaatccatgttagatatcttaggcaaatgcaacattgcagctgttcatggctccactcacaagtacatgagaggagcactgctttccatcattagccccaccttgatcagagatcagcttttgccaaaaattgatcagttcatgagagcccaccttagcaactggggtgacaaagtcatcaacattcaagagaaaaccaaagagatggccttcttatcatctctgaagcagattgctggcatggaatctggctcattatctgactcattcatggcagagttctttaagctagttctaggaaccctttctctccctattgatcttcctggcacaaattaccacagtggattccaggcaaggaagactatagtgaacattctgagtaagctcttagaggaaagaagagcatcacatgaaacctaccatgacatgcttggttgcttgatgggaagagatgaaagtagatacaaactaagtgatgaagaaatcattgatctagtgattacaatcatgtattctggctatgaaactgtttcaactacatcaatgatggcagtcaagtacctccatgaccatcccaaagctcttgaggaactcagaaaagaacatttggccataagagagaggaaaaagccagatgaaccacttgactgcaatgatctcaagtcaatgaggttcactcgcgcggtgatttttgagacctctagattggccacaatagttaatggggtcctaaggaaaaccactcaagacatggaastaaacggctatttgatccccaaaggatggagaatatatgtgtatacaagagagatcaattatgacccttttytatatcctgatccactaacattcaacccatggagatggatggacaagagtttagaatcaaagaactacttyttcatatttggaggaggcacccgacagtgtccaggaaaagagttgggaataaccgaaatttccactttcttacactactttgtaactagatacaggtgggaagaagtaggaggagataaagtaatgaaatttcctagagttgaggcmcctaatggactgcacataagggtgacatcttactaactaggccgtgactgtatgtacagtaatgagatgagatgtaacagattgtagggtatgtgtgtatgacaattatctaacaaatatatttagtaaaagaaagaaattaaattttyttyttcctcttcctttc

SEQ ID NO: 574 - protein, 465 aa, Glycine max
  misc_feature: Ceres CLONE ID no.624504
  misc_feature: Bit score of 418.2 for HMM based on sequences of FIGURE 7.
  misc_feature (212)..(461): Pfam Name: p450 Pfam Description: Cytochrome P450
  misc_feature: Functional Homolog Of Ceres SEEDLINE ID no. ME06336 at SEQ ID NO. 441
  misc_feature (358)..(358): Xaa is any aa, unknown, or other
  misc_feature (382)..(382): Xaa is any aa, unknown, or other
  misc_feature (405)..(405): Xaa is any aa, unknown, or other
  misc_feature (454)..(454): Xaa is any aa, unknown, or other
MAFLMAIVVVGVVLVLCFCSALLRWNEVRYRKKGLPPGTMGWPLFGETTEFLKQGPNFMKTQRARYGSFFKSHILGCPTIVSMDPELNRYILMNEAKGLVPGYPQSMLDILGKCNIAAVHGSTHKYMRGALLSIISPTLIRDQLLPKIDQFMRAHLSNWGDKVINIQEKTKEMAFLSSLKQIAGMESGSLSDSFMAEFFKLVLGTLSLPIDLPGTNYHSGFQARKTIVNILSKLLEERRASHETYHDMLGCLMGRDESRYKLSDEEIIDLVITIMYSGYETVSTTSMMAVKYLHDHPKALEELRKEHLAIRERKKPDEPLDCNDLKSMRFTRAVIFETSRLATIVNGVLRKTTQDMEXNGYLIPKGWRIYVYTREINYDPFXYPDPLTFNPWRWMDKSLESKNYXFIFGGGTRQCPGKELGITEISTFLHYFVTRYRWEEVGGDKVMKFPRVEXPNGLHIRVTSY

SEQ ID NO: 575 - DNA, 1620 bp, Populus balsamifera subsp. trichocarpa
  misc_feature: Ceres ANNOT ID no.1482951
  misc_feature: Encodes the peptide sequence at SEQ ID NO. 576
atgagagaaatttattcggcaacacttatgatctcgtccatcttattcatcgtttttcttgtacaattgcttgtatgcaagaagaagagcaaggaaaagacatcgtacaaattgccaccaggtagaagaggctggccattgattggtgatagcttcaactggttcaatgctgttgctggttctcatccccctcaatttgttcaccaacaagtcaataggtttggtaagatattctcatgcagtttgttcggaaaatgggctgtggtatcagcagacccgacctttaaccggtttataatgcaaaatgaaggcaaattgtttcaatcaagttatccaaaatcttttagagatttggttgggaaaaatggggtgatcacagtccacggagagcaacaacgaaaacttcatggaattgcatctaatatgatgcgtctagagaagctcaagttccatttcttggataatattcaattgattatgcttcaaactttgaacaaacttgacaacaaccaagtcattcttctccaagatgtttgcagaaaggcgagtagtgctctagtagctattaatctgatggtgaatcaactacttggggcatcaagtgagacagaaattaacgagatggctcacttcttctctgactttgtcgatggttgtctatctcttcccataaatattcctggttttgcctaccacactgccatgaaggcaagggagaaaattataagaaagataaacaagacaatagagaagcacgggcaagaagagtcatcagaaggtagtaatggggtgcttggaaggcttttagaggaagaaagtttgcctgataatgcagtagcagactttattatcaatctcctttttgctgggaatgaaacaacagctaaaaccatgctttttgctgtttatttcctcactcggtgtccaaaagcaatgcagcaactactggatgaacaagatagtataaggagtaattctagtggagagggaatgctaacatggcaagattacaaagcaatgtcttttactcagtgtgttattgatgaaacgcttcgactcggggggattgcaatatggctaatgagggaggccaagcaagatgtggtataccaagattatgtaattccgaaagggtgctttgtggttccatttctttcagcggttcacttggatgaaaatttgtacaagggagctagcaccttccatccttggagatggatggagcctgaaaatcaagaaaagagaaattggagaagtagcccattctactgtccctttggaggaggtgctcggttttgtccaggagcagagttgtctcgtctccaaattgctatctttcttcactactttgttactacatttaccttaggtagattaggagaacaaaaacacagcagctatagacctccacaaacgcagttgcaatccctagaagcaactctcttcacaacagagaaaatcacagcagcctctattgaagaatcagatctttcccgtgcaaagaaaaaacacgagcgcagcagtagcatctccgacagcagccctcaatcacgtcaacagagttctcccttccacaacattagaaaaacacgcgtagcagcagcaacacatatgctctga

SEQ ID NO: 576 - protein, 530 aa, Populus balsamifera subsp. trichocarpa
  misc_feature: Ceres ANNOT ID no.1482951
  misc_feature: Bit score of 396.2 for HMM based on sequences of FIGURE 7.
  misc_feature (261)..(447): Pfam Name: p450 Pfam Description: Cytochrome P450
  misc_feature: Functional Homolog Of Ceres SEEDLINE ID no. ME06336 at SEQ ID NO. 441
MISSILFIVFLVQLLVCKKKSKEKTSYKLPPGRRGWPLIGDSFNWFNAVAGSHPPQFVHQQVNRFGKIFSCSLFGKWAVVSADPTFNRFIMQNEGKLFQSSYPKSFRDLVGKNGVITVHGEQQRKLHGIASNMMRLEKLKFHFLDNIQLIMLQTLNKLDNNQVILLQDVCRKASSALVAINLMVNQLLGASSETEINEMAHFFSDFVDGCLSLPINIPGFAYHTAMKAREKIIRKINKTIEKHGQEESSEGSNGVLGRLLEEESLPDNAVADFIINLLFAGNETTAKTMLFAVYFLTRCPKAMQQLLDEQDSIRSNSSGEGMLTWQDYKAMSFTQCVIDETLRLGGIAIWLMREAKQDVVYQDYVIPKGCFVVPFLSAVHLDENLYKGASTFHPWRWMEPENQEKRNWRSSPFYCPFGGGARFCPGAELSRLQIAIFLHYFVTTFTLGRLGEQKHSSYRPPQTQLQSLEATLFTTEKITAASIEESDLSRAKKKHERSSSISDSSPQSRQQSSPFHNIRKTRVAAATHML

SEQ ID NO: 577 - protein, 466 aa, Phaseolus vulgaris
  misc_feature: Public GI ID no.68565030
  misc_feature: Bit score of 387.6 for HMM based on sequences of FIGURE 7.
  misc_feature (211)..(460): Pfam Name: p450 Pfam Description: Cytochrome P450
  misc_feature: Functional Homolog Of Ceres SEEDLINE ID no. ME06336 at SEQ ID NO. 441
MALFMAILGVLVLLLCFCSALLKWNEVRFRRKGLPPGAMGWPVFGETTEFLKQGPNFMKNKRARYGSFFKSHILGCPTIVSMDPELNRFILMNEAKGLVPGYPQSMLDILGTRNIAAVHGSTHKYMRGALLSIISPTLIRDQLLPKIDEFMRTHLMDWDNKVINIQEKTKEMAFLSSLKQIAGMESSSIAQPFMTEFFKLVLGTLSLPINLPRTNYRGGLQARKSIISILSQLLEERKASQDVHVDMLGCLMKKDENRYKLSDEEIIDLVITIMYSGYETVSTTSMMAVKYLHDHPKVLEEIRKEHFAIRERKKPEDPIDCNDLKSMRFTRAVIFETSRLATIVNGVLRKTTHDMELNGYLIPKGWRIYVYTREINYDPFLYHDPLTFNPWRWLGNSLESQSHFLIFGGGTRQCPGKELGIAEISTFLHYFVTRYRWEEVGGDKLMKFPRVVAPNGLHIRVSSFSN

SEQ ID NO: 578 - protein, 467 aa, Solanum lycopersicum
  misc_feature: Public GI ID no.68565099
  misc_feature: Bit score of 380.4 for HMM based on sequences of FIGURE 7.
  misc_feature (225)..(453): Pfam Name: p450 Pfam Description: Cytochrome P450
  misc_feature: Functional Homolog Of Ceres SEEDLINE ID no. ME06336 at SEQ ID NO. 441
MAIFLIIFVVFFGFCILSTPLFRWIDIVYNKKNLPPGTMGWPIFGETREFLNQGPNFMKNQRARYGNFFKSHILGCPTVVSMDAGLNVYILNNEAKGLIPGYPQSMLDILGKCNIAAVHGATHKYIRGALLSLINPTMIKDHILPKIDKFMRSHLSGWDNCNVIDIQQMTKEMAFFSSLDQIGGFATSSSIAQEFRAGFLNIALGTISLPINFPTTNYYRGLQGRKTIVKLLRKIIEDRRGSKKIQQDMLGLMMNEEAKNRYTLSDEELIDQIITIMYSGFETVSTTSMMAVKYLHDHPKALEEIRKEHFAIREKKSLEDPIDYNDFKAMRFTRAVIYETLRLATIVNGVLRKTTQDMELNGYMIPKGWRIYVYTRELNYDPLIYPDPYTFNPWRWLENNLDHQSSFLMFGGGTRLCPGKELGVAEISTFLHYFVTRYRWEEVGGNKLMKFPRVEALNGLWIKVSAY

SEQ ID NO: 579 - DNA, 1749 bp, Triticum aestivum
  misc_feature: Ceres CLONE ID no.756140
  misc_feature: Encodes the peptide sequence at SEQ ID NO. 580
agagcaatacttgttgccaacacagacaccgctctgcctcttgaacccaagcagagcatcaaagaaaccagaggaggcggaggcagaggaagaagatggcgctcctccttgtgcttgtcggcgttgtggtcggcgtggtgctcgcgagcagcctgctgctgcggtggaacgaggtcaggtacggccggaggaaggagggccgcttgccgccggggacaatggggtggccgctcttcggcgagaccaccgagttcctcaagcagggcccgagcttcatgaagcagaggaggctcaggtacgggaggctgttccggacgcacatcctgggttgccccacggtggtgtgcatggacccggagctcaaccgccggatgctgctgcagggcgaggccggcggcctggtgcccggctacccgcagtccatgctcgacatcctcggccgcaacaatatcgccgccgtgcacggccagctgcaccgcgtcatgcgtggtgccatggtcggcctcgtccgccccgccgcgctccggcaaagcctcctccccaagatcgacgccttcatgcgcgaccacctctgcggctgggccggcaccgttgtcgacgtccaggccaagaccaaggagatggccttgctgtctgcactcaggcagatcgccggcgtcacggccggcccactctctgacgccctcaagacggagctgtacacgcttgtgctcggcaccatctccttgcccatcaacctcccagggaccagctactaccaaggctttcaggcaaggaagaagctcgtgtccattctagagcagatgatcgcggaacggcgatcctctggtgatgctcacgatgacatgttggatgctctcttgagaagcggcgatgacggcaccagggaaaagattagcgatgagcagatcattgacttgctcatcgccctcatctactctgggtacgagaccatgtcgacgacctcaatgatggctgtcaagtacctgtcagaacatccgcgggccctcgaagaacttaggagagagcatcttgatatcaggaagggaaaatcgccggacgaagccatcagctacgatgatgtcaagtccatgactttcactcgagctgccatttttgagacgctaagattagccacagttgtgaatggactgctgaggaaaactattaaggatgtagaaatgaatgggtatgtcattccaaaaggctggagaatctatgtttacacaagggagataaactacgatccgttcatgtatcctgacccgatgacctttaatccgtggagatggctggagaagaacatggaatcgcacccgcacttcatgttgttcggagggggcggccggatgtgccccgggaaggaggtgggaacggtggagatcacgactttcctccactatttcgtgacccgatacagatgggaggaagaaggcaagaacaccatcttgaaattcccccgggtggaagctcccaacgggctgcatatccgagttcaagattactgaactcttccaagaaacattttgcagagtttagatagatatgacaaagacaaagacgatgagagcgcgattctgcgccgatgaatagattagattagaaatttgatacctgtataaacataggaaaatagcgatagtatagatgttataggttcactaggtagccgggataataggcaacaacatgctcctgtgttcttttgttctaccaattccgaaatgaacaaaggcgtatgatgtgggt

SEQ ID NO: 580 - protein, 470 aa, Triticum aestivum
  misc_feature: Ceres CLONE ID no.756140
  misc_feature: Bit score of 401.8 for HMM based on sequences of FIGURE 7.
  misc_feature (218)..(466): Pfam Name: p450 Pfam Description: Cytochrome P450
  misc_feature: Functional Homolog Of Ceres SEEDLINE ID no. ME06336 at SEQ ID NO. 441
MALLLVLVGVVVGVVLASSLLLRWNEVRYGRRKEGRLPPGTMGWPLFGETTEFLKQGPSFMKQRRLRYGRLFRTHILGCPTVVCMDPELNRRMLLQGEAGGLVPGYPQSMLDILGRNNIAAVHGQLHRVMRGAMVGLVRPAALRQSLLPKIDAFMRDHLCGWAGTVVDVQAKTKEMALLSALRQIAGVTAGPLSDALKTELYTLVLGTISLPINLPGTSYYQGFQARKKLVSILEQMIAERRSSGDAHDDMLDALLRSGDDGTREKISDEQIIDLLIALIYSGYETMSTTSMMAVKYLSEHPRALEELRREHLDIRKGKSPDEAISYDDVKSMTFTRAAIFETLRLATVVNGLLRKTIKDVEMNGYVIPKGWRIYVYTREINYDPFMYPDPMTFNPWRWLEKNMESHPHFMLFGGGGRMCPGKEVGTVEITTFLHYFVTRYRWEEEGKNTILKFPRVEAPNGLHIRVQDY

SEQ ID NO: 581 - DNA, 1692 bp, Populus balsamifera subsp. trichocarpa
  misc_feature: Ceres ANNOT ID no.1457317
  misc_feature: Encodes the peptide sequence at SEQ ID NO. 582
atggaacaaaagagtggagtgcttccaaagggaagctttggctggcctctgataggagaaactcttgacttcattgctgctggctacacttctcaacctgttagtttcatggagaaacgcagatcactgccaaaatgttcttttgaatacacatatgtgcctacaacaccttcaccagtaacaattaattaccttcaagccaatctaagctcacaatgccgacaagtttttcatggtctagaggccatagatagacatgccgattgccgaaggtacgggaaggtgttcaaaacacacatcctggggacacccatcatagtatccacggatccagcagtgaacaaagttgttttacaaaaccatggcaacatttttattcctgcttatcctaaatcagtcagggaaatatttggagaatattctatacttcaaaccaatggaactctacagaagaaggtccatgcacttattggtggtttcttgaggtcaccacagttcaaaactagaattaccaaagacattgagcaccatgtcaaactcaccttgacttcttggaaggacctgccccttctattcgtccaagaagaaacccaaaagttcacgttcaaagtcttggttaaagcattgctaagtcttgatccaagtgatgatttggattttcttaagagagaattcgatgaattcatcaaagggttgatatgtctgccgatcaaattaccaggaacaagattatacaaatccttaaaggctaaagagagaatattcaagctagtaaaaaagattgttgagcaaagaaaattgggcttggagaaatcagaagatcaagaacatcaaaatacaatccctaatgatgcggtggacgtgcttttacgtgacatttctggtgaacaaaatgacaagcaatctctatcgttggatttcatcatttcacatattattgagctgatgatccctggagaagaaaccgtgcctatgtccatgaccttagctgtcaaattcctcagtgactgccctgtcgctctagagctattaacggaagtgcatgaagacatgtccctgccatctctgaacttgacactagaagcaaagataagagcagaaaagtttgtactaagacaatggaatgttttaaaagaactgcctgaaataaacgaacgtgaactggctagctgctggttgaagcaggatttggaggagaacatgaaattgaagaggcagaagactgattctggtgatgattattgttggactgattacatgtccttgcaatttactcagaatgtgataaatgaaactcttagagtagcaaacataatcaatgcagtttggaggaaagctctcaaggatgtagagatcaaaggaattctgattcccgaaggatggtgtgtcctgacatctttcagctctgtacatatggatgaagaaaattatgaaaacccacatgagtttgatccatggagatgggagaaaacaggagcttctgttaagaacaattgctttacaccttttggaggtggacaaaggctatgccctggtctagaactatccaggcttgaaatctccatcttccttcaccatcttgtcacaacttacagatggattgctgaaaaggatgacattatttactttccaacagtgaagttaaagaaaaagctgcctatcagagtcacctccataggcaactcttcatga

SEQ ID NO: 582 - protein, 563 aa, Populus balsamifera subsp. trichocarpa
  misc_feature: Ceres ANNOT ID no.1457317
  misc_feature: Bit score of 501.9 for HMM based on sequences of FIGURE 7.
  misc_feature (415)..(558): Pfam Name: p450 Pfam Description: Cytochrome P450
  misc_feature: Functional Homolog Of Ceres SEEDLINE ID no. ME06336 at SEQ ID NO. 441
MEQKSGVLPKGSFGWPLIGETLDFIAAGYTSQPVSFMEKRRSLPKCSFEYTYVPTTPSPVTINYLQANLSSQCRQVFHGLEAIDRHADCRRYGKVFKTHILGTPIIVSTDPAVNKVVLQNHGNIFIPAYPKSVREIFGEYSILQTNGTLQKKVHALIGGFLRSPQFKTRITKDIEHHVKLTLTSWKDLPLLFVQEETQKFTFKVLVKALLSLDPSDDLDFLKREFDEFIKGLICLPIKLPGTRLYKSLKAKERIFKLVKKIVEQRKLGLEKSEDQEHQNTIPNDAVDVLLRDISGEQNDKQSLSLDFIISHIIELMIPGEETVPMSMTLAVKFLSDCPVALELLTEVHEDMSLPSLNLTLEAKIRAEKFVLRQWNVLKELPEINERELASCWLKQDLEENMKLKRQKTDSGDDYCWTDYMSLQFTQNVINETLRVANIINAVWRKALKDVEIKGILIPEGWCVLTSFSSVHMDEENYENPHEFDPWRWEKTGASVKNNCFTPFGGGQRLCPGLELSRLEISIFLHHLVTTYRWIAEKDDIIYFPTVKLKKKLPIRVTSIGNSS

SEQ ID NO: 583 - protein, 512 aa, Arabidopsis thaliana
  misc_feature: Public GI ID no.15219454
  misc_feature: Bit score of 461.1 for HMM based on sequences of FIGURE 7.
  misc_feature (230)..(502): Pfam Name: p450 Pfam Description: Cytochrome P450
  misc_feature: Functional Homolog Of Ceres SEEDLINE ID no. ME06336 at SEQ ID NO. 441
MAESAGESYRLLSVSSSTTFLAFIIIFLLAGIARRKRRAPHRLPPGSRGWPLIGDTFAWLNAVAGSHPSSFVEKQIKKFVSLLCSVLLLILKRPDNSGFNEIRYGRIFSCSLFGKWAVVSADPDFNRFIMQNEGKLFQSSYPKSFRDLVGKDGVITVHGDQQRRLHSIASSMMRHDQLKTHFLEVIPVVMLQTLSNFKDGEVVLLQDICRKVAIHLMVNQLLGVSSESEVDEMSQLFSDFVDGCLSVPIDLPGFTYNKAMKARKEIIRKINKTIEKRLQNKAASDTAGNGVLGRLLEEESLPNESMADFIINLLFAGNETTSKTMLFAVYFLTHCPKAMTQLLEEHDRLAGGMLTWQDYKTMDFTQCVIDETLRLGGIAIWLMREAKEDVSYQDYVIPKGCFVVPFLSAVHLDESYYKESLSFNPWRWLDPETQQKRNWRTSPFYCPFGGGTRFCPGAELARLQIALFLHYFITTYKWTQLKEDRISFFPSARLVNGFKIQLNRRDSDPPNQ

SEQ ID NO: 584 - DNA, 1813 bp, Zea mays
  misc_feature: Ceres CLONE ID no.240663
  misc_feature: Encodes the peptide sequence at SEQ ID NO. 585
cccgtgatgttttaaatttcggatcctgtgttgcagctttgaagtgcatgaacgagacatgcagagccgcgtgacgtgagttctccccataccgcccgatctcggagatgtgcgcgtaccacatgaggctcaccggcggcgcggcctttgtgctccttatggttctcctcttgctgctgtatgcggtgcacaggtggaggaaccctcgatgcagcggccgcctgccgccgggctccatgggcctgccgctcgtcggagagacgctgcagttcttctcccctgaagcttccttggacgtcccgcgtttcgtccgacacagactgcaaaggtacggcccgatcttcaagacgagcctggtgggccacccggtcgtcgtctccgcggacgaggagctgaactacatggtgttccagcaggaggggcagctgttccagagctggtacccggactccttcgtggagatcctaggcagggacaacgtcggggagcagcagggcgccatgttcaagtacctcaagaacatggtgctccgctacttcggcccggagagcctcagggagtccatgctccgcgacgtcgagcacgccgtcagcagctcgctctgtacctggtcaaccttgccgtcggtcgagctgaaagaggccgtctccacgatggtgttcgatctttcagcgaacaagcttctcagcttggagccgtcgaggtccaagattctgaggaggagcttcttcgacttcgttcgagggctcatctcgttccctctgtatttgccaggaacagcatactactcatgcatgaagggccggcagagcgcaatggaggtgctgcaggaagtgctagcggagaggaagagactggtacaggtgcccggagcaggaggaggcgccatggaaacgatacgtcgccatggcggcgacttcttggacctcgtcatccaggaagtcacgaaggagaagccgctcgtgacggacagaatggcgctcgacctgatgttcgtgctcctgttcgccagcttccacacgacgtcgctagcgctcactctggctgtcaagctgcttgcagaccaccctcgcgtcctggaagagctcacggtggagcatgaagcgattctgaatgaacgtaacgcgcgccatggatctgatggaatcacatggatggagtacaagtctatgacgttcacatcccaggtcatcaacgagactgtccgattagccaatattgcgcctggcatcttcagaaaggcactgaaagatatacagttcagagggttcacaattccagcaggatggggagtgatggtctgtcctccagcagtgcacttgaacccagtcatttacccagatcccctcatctttaaccctacaaggttcaaggataaaccggagataaaccgtgggtcaagacacttcatggcattcggaggaggcctccgatcctgtgttggagcagacttcagcaagttgcaaatgtctattttcctccatttccttgtcactagatacaggtggagaagtcttgggggtggcaaggtagtccgaaatccggggctagaattccctgatggctaccacattcaaatacggcactggaattaattctgctaatactacagagtcaatctcgttgtgcattcaagccaagaaacggacggagggaaagaattactgttaggctctatttggatcttttgaattgaatttcattctaataattataattcaaacacagattaattagaataatataattttatgtgagatatatttttatagtactgttggtcaccatataaatttattataagcttatatcc

SEQ ID NO: 585 - protein, 495 aa, Zea mays
  misc_feature: Ceres CLONE ID no.240663
  misc_feature: Bit score of 399.4 for HMM based on sequences of FIGURE 7.
  misc_feature (270)..(467): Pfam Name: p450 Pfam Description: Cytochrome P450
  misc_feature: Functional Homolog Of Ceres SEEDLINE ID no. ME06336 at SEQ ID NO. 441
MCAYHMRLTGGAAFVLLMVLLLLLYAVHRWRNPRCSGRLPPGSMGLPLVGETLQFFSPEASLDVPRFVRHRLQRYGPIFKTSLVGHPVVVSADEELNYMVFQQEGQLFQSWYPDSFVEILGRDNVGEQQGAMFKYLKNMVLRYFGPESLRESMLRDVEHAVSSSLCTWSTLPSVELKEAVSTMVFDLSANKLLSLEPSRSKILRRSFFDFVRGLISFPLYLPGTAYYSCMKGRQSAMEVLQEVLAERKRLVQVPGAGGGAMETIRRHGGDFLDLVIQEVTKEKPLVTDRMALDLMFVLLFASFHTTSLALTLAVKLLADHPRVLEELTVEHEAILNERNARHGSDGITWMEYKSMTFTSQVINETVRLANIAPGIFRKALKDIQFRGFTIPAGWGVMVCPPAVHLNPVIYPDPLIFNPTRFKDKPEINRGSRHFMAFGGGLRSCVGADFSKLQMSIFLHFLVTRYRWRSLGGGKVVRNPGLEFPDGYHIQIRHWN

SEQ ID NO: 586 - protein, 472 aa, Hordeum vulgare subsp. vulgare
  misc_feature: Public GI ID no.110832074
  misc_feature: Bit score of 400.8 for HMM based on sequences of FIGURE 7.
  misc_feature (220)..(468): Pfam Name: p450 Pfam Description: Cytochrome P450
  misc_feature: Functional Homolog Of Ceres SEEDLINE ID no. ME06336 at SEQ ID NO. 441
MALLLLALVVVGVVASSLLLRWNEVRYGNGRRKHGDACLPPGTMGWPLFGETTEFLKQGPSFMKQRRLRYGRLFRTHILGCPTVVCMDPELNRRMLLQGEAGGRVPGYPQSMLDILGRNNIAAVHGPLHRVMRGAMLGLVRPAALRQSLLPKMDAFMRHHLAGWAGTVVDVQAKTKEMALLSALRQIAGITAGPLSDALQTELYTLVLGTISLPINLPGTSYYQGFQARTKLVSMLEQMIAERRSSGEAHDDMLDALLRSGDDGTREKISDEQIIDLLIALIYSGYETMSTTSMMAVKYLSEHPRALQELRREHLDIRKGKLPEEAIGYDDFKSMSFTRAVIFETLRLATVVNGLLRKTTQDVEMNGYVIPKGWRIYVYTREINYDPFMYPDPMTFNPWRWLEKNMESHPHFMLFGGGSRMCPGKEVGTAEIATFLHRFVTQYRWEEEGKNTILKFPRVEAPNGLHIRVQDY

SEQ ID NO: 587 - DNA, 1425 bp, Populus balsamifera subsp. trichocarpa
  misc_feature: Ceres ANNOT ID no.1461443
  misc_feature: Encodes the peptide sequence at SEQ ID NO. 588
atgtgggcaattggattggttgttgtcgcattggttgtggtatactatagtcatttgattagcaaatggaagaatcctaaaattgacggggttctccctccaggctccatgggctggcccctcatcggagaaactctgcagttcattattcctggaagatctctagacctccatccattcgtcaagaaaaggatgcaaaagtatggaccgatctttaaaaccagcttagttggtaggcctatcattgtgtccactgactatgaaatgaacaagtacatcttgcaacatgaaggaactctggttgagctatggtatttggattcatttgccaaggttttcgctcttgagggtgaaacgagggtgaacgccatcggcaaagttcaccgatacttgagaagcataactttgaaccactttggcgttgagagcctgaaggaatcattgcttcctaaaatagaagacatgctgcacaccagcttagcaaagtgggctactcaaggacctgttgacgtcaaacaagttatttcagttatggttttcaattttactgcgaacaaaatatttggttatgatgctgaaaactcgagagagaagctaagtgagaattacacaaggatcttgaacagtttcatctccttgcccttgaatatccctggcacttccttccaccagtgcatgcaggaccgagagaagatgttgaaaatgttgaagaatacactgatggagagactcaacgatccatcaaagcgtcggggagattttcttgatcaagccattgatgatatggagacagagaagttcttgacagtggatttcatcccccaactcatgttcgggatcttatttgccagcttcgaatctatgtcaaccactctaactctaacattcaagtttctttcagagaacccccgagtagttgaggaattagcagctgagcacgacgcaattgtgaagaacagagaaaatccaaactcccgcctcacttgggaagagtacagatcgatgacttttacccaaatggtcgtcaatgaaacacttagaatttccaacatcccacctggtctgttccgaaaggcattgaaagatttccaggtcaaaggatacactgttccagctggttggacagtaatgattgttactcctgctattcaattaaatcctgagacattcaaggatccagttacattcaacccatggcggtggaaggaacttgaccaagttaccatttccaaaaacttcatgccattcggtggcggcacaaggcaatgcgccggggcggagtacagcaagctggtcttgtcgacttttcttcatatcttggtcaccaaatacaggtttaccaaggtcaagggaggagacgtatctcgcactcctatcatttcatttggcgatggcatccagattaagtttacagccaagaactga

SEQ ID NO: 588 - protein, 474 aa, Populus balsamifera subsp. trichocarpa
  misc_feature: Ceres ANNOT ID no.1461443
  misc_feature: Bit score of 369.2 for HMM based on sequences of FIGURE 7.
  misc_feature (33)..(470): Pfam Name: p450 Pfam Description: Cytochrome P450
  misc_feature: Functional Homolog Of Ceres SEEDLINE ID no. ME06336 at SEQ ID NO. 441
MWAIGLVVVALVVVYYSHLISKWKNPKIDGVLPPGSMGWPLIGETLQFIIPGRSLDLHPFVKKRMQKYGPIFKTSLVGRPIIVSTDYEMNKYILQHEGTLVELWYLDSFAKVFALEGETRVNAIGKVHRYLRSITLNHFGVESLKESLLPKIEDMLHTSLAKWATQGPVDVKQVISVMVFNFTANKIFGYDAENSREKLSENYTRILNSFISLPLNIPGTSFHQCMQDREKMLKMLKNTLMERLNDPSKRRGDFLDQAIDDMETEKFLTVDFIPQLMFGILFASFESMSTTLTLTFKFLSENPRVVEELAAEHDAIVKNRENPNSRLTWEEYRSMTFTQMVVNETLRISNIPPGLFRKALKDFQVKGYTVPAGWTVMIVTPAIQLNPETFKDPVTFNPWRWKELDQVTISKNFMPFGGGTRQCAGAEYSKLVLSTFLHILVTKYRFTKVKGGDVSRTPIISFGDGIQIKFTAKN

SEQ ID NO: 589 - DNA, 1395 bp, Populus balsamifera subsp. trichocarpa
  misc_feature: Ceres ANNOT ID no.1450198
  misc_feature: Encodes the peptide sequence at SEQ ID NO. 590
atggctgttttcttcgtggttcttgtggtagttctctttttgttcggtatctcctctgctttgttgaggtggaatgaggtgagatataggaagaaagggttgcctccaggcaccatgggatggccaatctttggagagaccactgagtttctaaagcaaggcccgaacttcatgaaaaatcagagcgcaaggtatgggagttttttcaaatcccacattctggggtgtcctaccattgtttccatggatccagagctcaacaggtacatactaatgaatgaggcaaaaggccttgttcctggttaccctcagtccatgttggatatcttaggcaattgcaacattgcagcagttcatggctccactcacaagtacatgagaggggcattgttatccctcatcagccccaccatgatcagagaacaacttttgccaacaattgatgagttcatgagaacccacctcagcgattgggattccaaaattattgacattcaacaaatgactaaagagatggcccttctttctgcactcaaacaaattgttggcattgattctagctcaatatctcaagcattcatgcctgagtttttcaagctggttttaggcactttgtcattgccgattgaccttcctggcactaattatacgcgtggagtccaggcgagaaaaaaaatcataagcatgtttaggaaggtaatacaagagaggagggcgtcaaaattatcgcaccaggacatgcttggtaaactgatgagaactcaagaaaataaatacaaattaacagatgaagaaataattgatcagataatcacaattctgtactctggctacgaaacggtttcgactacttcaatgatggcagtcaagtatttgcatgatcacccaacagtccttcaagagctaagaaaagagcatttggcagtaagagaaaagaaaaggcctgaggacccaattgatttgaatgatcttaaaccgatgcgttttactcgtgccgtgattcttgagacctcaagaatggcgacgatagtaaatggggttttgaggaagactactagagaaatggaactgaatggatttgtgattccaaaaggatggaggatctatgtttacacaagagagataaactatgatccacatatatatcctgaccctttatccttcaacccatggagatggctggacaaaagtctggagtctcaaaactatctcttcatttttggaggaggtgctaggcagtgtccagggaaggagctaggaatagctgaaatctcaactttccttcattatttcgtaactcgatacagatgggaagaggttggaggggacacactaatgaaatttccaagagttgaagcaccaaatgggctacacataagggtctcatctcactaa

SEQ ID NO: 590 - protein, 464 aa, Populus balsamifera subsp. trichocarpa
  misc_feature: Ceres ANNOT ID no.1450198
  misc_feature: Bit score of 381.2 for HMM based on sequences of FIGURE 7.
  misc_feature (211)..(460): Pfam Name: p450 Pfam Description: Cytochrome P450
  misc_feature: Functional Homolog Of Ceres SEEDLINE ID no. ME06336 at SEQ ID NO. 441
MAVFFVVLVVVLFLFGISSALLRWNEVRYRKKGLPPGTMGWPIFGETTEFLKQGPNFMKNQSARYGSFFKSHILGCPTIVSMDPELNRYILMNEAKGLVPGYPQSMLDILGNCNIAAVHGSTHKYMRGALLSLISPTMIREQLLPTIDEFMRTHLSDWDSKIIDIQQMTKEMALLSALKQIVGIDSSSISQAFMPEFFKLVLGTLSLPIDLPGTNYTRGVQARKKIISMFRKVIQERRASKLSHQDMLGKLMRTQENKYKLTDEEIIDQIITILYSGYETVSTTSMMAVKYLHDHPTVLQELRKEHLAVREKKRPEDPIDLNDLKPMRFTRAVILETSRMATIVNGVLRKTTREMELNGFVIPKGWRIYVYTREINYDPHIYPDPLSFNPWRWLDKSLESQNYLFIFGGGARQCPGKELGIAEISTFLHYFVTRYRWEEVGGDTLMKFPRVEAPNGLHIRVSSH

SEQ ID NO: 591 - protein, 481 aa, Sorghum bicolor
  misc_feature: Public GI ID no.18483228
  misc_feature: Bit score of 393.2 for HMM based on sequences of FIGURE 7.
  misc_feature (227)..(477): Pfam Name: p450 Pfam Description: Cytochrome P450
  misc_feature: Functional Homolog Of Ceres SEEDLINE ID no. ME06336 at SEQ ID NO. 441
MSMHYLAALSVTLLGAILLRWAFKWMNYGRTGGEEGMLLPPGSRGLPFLGETLEFFAASPTLELVPFFKRRLERFGPIFRTNIVGEDMIVSLDPELNARVLQQEERGFQIWYPSSFMRILGADNMVSMLGPLHRHIRNLVLRLFGPEALRLVLLRDVQRSARDELRSWLDRPEVEVRTATSRMIFGVTAKKLISHDDVASGGSLWKCFDAWTKGLMSFPICVPGTAFYRCMQGRKNVMKVLKQQLDERRNGAERKTVDFFDLVIDELDKPNSIMSESIALNLLFLLLFASHETTSMGLTVILKFLTDNPKSLQELTEEHEKIMERRVDPDSDITWEEYKSMKFTSHVIHESLRLANIAPVVFRQANQDVHIKGYTIPEGSKIMICPSAAHLNSKVYEDPLAFNPWRWKDTPEPVGGSKDFMAFGGGLRLCVGAEFAKLQMAMFLHYLVTNYRWKALSKGTMMLYPGLRFPDGFHIQLHKKT

SEQ ID NO: 592 - protein, 465 aa, Arabidopsis thaliana; identical to SEQ ID NO: 489
  misc_feature: Public GI ID no.18406372
  misc_feature: Bit score of 365.4 for HMM based on sequences of FIGURE 7.
  misc_feature (212)..(462): Pfam Name: p450 Pfam Description: Cytochrome P450
  misc_feature: Functional Homolog Of Ceres SEEDLINE ID no. ME06336 at SEQ ID NO. 441

SEQ ID NO: 593 - protein, 462 aa, Arabidopsis thaliana
  misc_feature: Public GI ID no.21536828
  misc_feature: Bit score of 365.4 for HMM based on sequences of FIGURE 7.
  misc_feature (209)..(459): Pfam Name: p450 Pfam Description: Cytochrome P450
  misc_feature: Functional Homolog Of Ceres SEEDLINE ID no. ME06336 at SEQ ID NO. 441
MMMILGLLVIIVCLCTALLRWNQMRYSKKGLPPGTMGWPIFGETTEFLKQGPDFMKNQRLRYGSFFKSHILGCPTIVSMDAELNRYILMNESKGLVAGYPQSMLDILGTCNIAAVHGPSHRLMRGSLLSLISPTMMKDHLLPKIDDFMRNYLCGWDDLETVDIQEKTKHMAFLSSLLQIAETLKKPEVEEYRTEFFKLVVGTLSVPIDIPGTNYRSGVQARNNIDRLLTELMQERKESGETFTDMLGYLMKKEDNRYLLTDKEIRDQVVTILYSGYETVSTTSMMALKYLHDHPKALEELRREHLAIRERKRPDEPLTLDDIKSMKFTRAVIFETSRLATIVNGVLRKTTHDLELNGYLIPKGWRIYVYTREINYDTSLYEDPMIFNPWRWMEKSLESKSYFLLFGGGVRLCPGKELGISEVSSFLHYFVTKYRWEENGEDKLMVFPRVSAPKGYHLKCSPY

SEQ ID NO: 594 - protein, 438 aa, Solanum lycopersicum
  misc_feature: Public GI ID no.89146806
  misc_feature: Bit score of 338.3 for HMM based on sequences of FIGURE 7.
  misc_feature (211)..(437): Pfam Name: p450 Pfam Description: Cytochrome P450
  misc_feature: Functional Homolog Of Ceres SEEDLINE ID no. ME06336 at SEQ ID NO. 441
MAFFLIFLSSFFGLCIFCTALLRWNQVKYNQKNLPPGTMGWPLFGETTEFLKLGPSFMKNQRARYGSFFKSHILGCPTIVSMDSELNRYILVNEAKGLVPGYPQSMIDILGKCNIAAVNGSAHKYMRGALLSLISPTMIRDQLLPKIDEFMRSHLTNWDNKVIDIQEKTNKMAFLSSLKQIAGIESTSLAQEFMSEFFNLVLGTLSLPINLPNTNYHRGFQARKIIVNLLRTLIEERRASKEIQHDMLGYLMNEEATRFKLTDDEMIDLIITILYSGYETVSTTSMMAVKYLHDHPKVLEELRKEHMAIREKKKPEDPIDYNDYRSMRFTRAVILETSRLATIVNGVLRKTTQDMEINGYIIPKGWRIYVYTRELNYDPRLYPDPYSFNPWRWMDKSLEHQNSFLVFGGGTRQCPGKELGVAEISTFLHYFVTKYRWR

SEQ ID NO: 595 - protein, 463 aa, Oryza sativa subsp. japonica
  misc_feature: Public GI ID no.125602937
  misc_feature: Bit score of 306.1 for HMM based on sequences of FIGURE 7.
  misc_feature (288)..(440): Pfam Name: p450 Pfam Description: Cytochrome P450
  misc_feature: Functional Homolog Of Ceres SEEDLINE ID no. ME06336 at SEQ ID NO. 441
MEFLSSVSYLFKALCTCGVAFVTGWFAHWVYRWMNPQCDGKLPPGSMGLPLVGETFRFFRASASIDMPSYYKERLKRYGPIFKTSLVGQPLVISLDPEVNRFVFQQEGKLFRSWYPETTNTIFGKKSLTTYSGAVNKFVRSFASKLFGPTNLKESLLPELESAVRESFATWVMNPSIEVKDGISNMIFDLVAKKLIGFNPTKSRELRKNFQEFFQGMVSFPIYFPGTSFYRCMQGRRNVHKTLTDLLKERLSAPGEKYNDLIDQIIEELQSENPVIDVNFAVDVLSALLFASFATLSSTLSVGFKFLTDNPKVVKELKEEHTTILNKRGSLNSGFTWEEYKSLMFTSQVVHEITRISNVAPGIFRKTLADVKVKGYTIPAGWLVMISPMAVDLNPTLFEDPLEFNPWRWTDKTKQSELLRNYMPFGGGIRLCLGAEFSKLFIALFIHVLVTEYRSLIGLYNSN

SEQ ID NO: 596 - DNA, 1930 bp, Panicum virgatum
  misc_feature: Ceres CLONE ID no.1868840
  misc_feature: Encodes the peptide sequence at SEQ ID NO. 597
ggagagatatagagcagggaacagcagcccgggggtgagctgtgtgaggcttcaacaaagctaagtgaagcattcacacaccataggagtatatacacatacacatatatagacagagatcgagactcttgcaggctccatgcttgggagatgaaacttgggtgtggtggtggccgtcgatgatggcggtggcgggggagctcgcgcttgccgccctggcggcgatcctgctcgcctggctcctggccctggtgctgagccacttcctgcccttgctcctgaaccccaaggcccccaggggtagcttcggatggccgctcgtcggcgagacgctcaggttcctcgcgccccattcttccaacacgctgggcggcttcctggaggatcactgcgccaggtatgggcgggtgttcaagtcccacttgttctgcacccccacggtggtgtcctgcgaccaggacctcaaccacttcatcctgcagaacgaggagcggctgttccagtgcagctacccgaggccgatccatggcatcctgggcaagtcctccatgctcgtggtcctgggcgaggaccacgagcgcctcaggaacctcgccctcgccctcgtcacctccaccaagctaaagcccggctacctcggcgacatcgagaagatcgcgctgcacgtcgtcggctcatggcgccaggacggcggcggcggtagggtcgtcgccttctgcgaggaggcaaggaagttcgcgttcagtgtgatagtgaagcaggtgctggggctgtcaccagaggacccggtcactgccaggatactggaggacttcctggccttcatgaagggcctcatctccttccctctctacatcccagggaccccatatgccaaggctgtccaggctagagagaggatatccagcactgtgaagggcatcatcgaggagcggaggagtccagggtcatgcaagaagggcgatttccttgacgtgctcctgtcaagcaacgagctctccgatgacgagaaagtgagctttgtgctggactccctgctgggaggatacgagaccacctcgctcttgatctccatggtcgtatattttcttgggcagtctgcagaagatctggacctggtcaagagggagcacgacagcataagatccaacaaagggaaggaggagagcttgacttcagaagactacaagaagatggaatatacccaacatgttatcaacgaggctctgagatgcggcaacatagtcaagttcgtccacaggaaggccctcaaagatgtcagatacaaagagtatctgattccatctggctggaaggtcctacccgtcttcagtgctgttcatctgaacccctcgcttcatggaaatgcccaacattttcagccctgtagatgggagggctcaagccaagggacaagcaagaggtttacgccgttcggtggcgggcctcggctctgcccaggatcggagcttgctaaattagaggctgctttctttctccatcaccttgtgctcaattatagatggagaatcgatggcgatgacattccaatggcatacccgtacgtggagtttcagagaggtctgccaatagaaatcgagccaatctgccatgaatcttgacttggcctgaaggcccggtcacggcgagttcatctgttagctagaaggtacctgcacgggaaacatccatgtccatgaacggcgtgaagtttcatgaagtgaagaaacactgggcactagcttgtaagtagctagcatgaggcagctgagactgtgatttatgatgtacatgatgtagatatattttccccatggcaattgctcgaggtggttggttcacttcagtacttcaccctgtaacattctccactgtggctcaaccactgttctatacgagaagtttggactcctgggattcggaaggcttt

SEQ ID NO: 597 - protein, 480 aa, Panicum virgatum
  misc_feature: Ceres CLONE ID no.1868840
  misc_feature: Bit score of 1226.4 for HMM based on sequences of FIGURE 7.
  misc_feature (224)..(461): Pfam Name: p450 Pfam Description: Cytochrome P450
  misc_feature: Functional Homolog Of Ceres SEEDLINE ID no. ME06336 at SEQ ID NO. 441
MMAVAGELALAALAAILLAWLLALVLSHFLPLLLNPKAPRGSFGWPLVGETLRFLAPHSSNTLGGFLEDHCARYGRVFKSHLFCTPTVVSCDQDLNHFILQNEERLFQCSYPRPIHGILGKSSMLVVLGEDHERLRNLALALVTSTKLKPGYLGDIEKIALHVVGSWRQDGGGGRVVAFCEEARKFAFSVIVKQVLGLSPEDPVTARILEDFLAFMKGLISFPLYIPGTPYAKAVQARERISSTVKGIIEERRSPGSCKKGDFLDVLLSSNELSDDEKVSFVLDSLLGGYETTSLLISMVVYFLGQSAEDLDLVKREHDSIRSNKGKEESLTSEDYKKMEYTQHVINEALRCGNIVKFVHRKALKDVRYKEYLIPSGWKVLPVFSAVHLNPSLHGNAQHFQPCRWEGSSQGTSKRFTPFGGGPRLCPGSELAKLEAAFFLHHLVLNYRWRIDGDDIPMAYPYVEFQRGLPIEIEPICHES

SEQ ID NO: 598 - protein, 480 aa, Oryza sativa subsp. japonica
  misc_feature: Public GI ID no.115458894
  misc_feature: Bit score of 1222.1 for HMM based on sequences of FIGURE 7.
  misc_feature (224)..(461): Pfam Name: p450 Pfam Description: Cytochrome P450
  misc_feature: Functional Homolog Of Ceres SEEDLINE ID no. ME06336 at SEQ ID NO. 441
MVGGELVLAALVILLALLLTLVLSHFLPLLLNPKAPKGSFGWPLLGETLRFLSPHASNTLGSFLEDHCSRYGRVFKSHLFCTPTIVSCDQELNHFILQNEERLFQCSYPRPIHGILGKSSMLVVLGEDHKRLRNLALALVTSTKLKPSYLGDIEKIALHIVGSWHGKSKDKGMVNVIAFCEEARKFAFSVIVKQVLGLSPEEPVTAMILEDFLAFMKGLISFPLYIPGTPYAKAVQARARISSTVKGIIEERRNAGSSNKGDFLDVLLSSNELSDEEKVSFVLDSLLGGYETTSLLISMVVYFLGQSAQDLELVKREHEGIRSKKEKDEFLSSEDYKKMEYTQHVINEALRCGNIVKFVHRKALKDVRYKEYLIPSGWKVLPVFSAVHLNPLLHGNAQQFQPCRWEGASQGTSKKFTPFGGGPRLCPGSELAKVEAAFFLHHLVLNYRWRIDGDDIPMAYPYVEFQRGLPIEIEPLCSES

SEQ ID NO: 599 - DNA, 1419 bp, Populus balsamifera subsp. trichocarpa
  misc_feature: Ceres ANNOT ID no.1472214
  misc_feature: Encodes the peptide sequence at SEQ ID NO. 600
atggctggagagctctgggttggtgttttggttggtataactagtggtctgttgggtctaataatgaatcattttctgcccatgttcttgaagcttggtcataatgtcccaaagggctcttttgggtggcctctacttggtgaaaccctcggtttcttgaaacctcacccttctaacacccttggtgcgtttcttcaagatcattgttccaggtacgggaatgtgttcaagtcccatttatttctctctccaacagtggtgtcctgtgaccaggagctgaactatttcattcttcaaaacgaaggcaagttattccagtgcagttatcctaagcctattcacggaattcttggcaatgtctccatgctggtggctgttggtgatactcacaagagactcagaaatgtggctatctctctagttagcattactaaatcaaagccagagttcttgaatgacatagaaagaactgccattcaaatattgagctcctggaaagataaacaacaggtcgtgttctgtgaagaggctagaaagttctcattcaatgtaatagtaaagcaagtgcttggtttaacatcagaggagccggagactagagaaattcttgaagattttcttacttttatgagaggactagtatccatccctctgtatattcctggtactccatatgctagagctgttcaggctagaagcaggatatcttctagagttaaagcaattatagaggaaagaagatcaagaaatagtaggagtttaaggaatgattttcttgaaatacttctaagtgttgataccttatctgaagatgaaaaggtgagctttgtgttggattctcttttgggtgggtatgaaactacctcgctcttaatggccatggtggtgcatcttctaggccagtcacccactgcattagaacagttaaagctagagcatgagcaaataacaagcctgaaggagaaagatgagtgtttgaattgggaagattataagacgatggaattcactcaaaatgtcatcagtgaagcactgagatatggaaacattgtgaaatttgtacaccgaaaggctctcaaagacgtaaagttcagagactacctcattccatctgggtggaaggtcctacctgtttttacagctgtgcatttagactcgtctgtccatgcaaatgctctccagtttcatccttggagatgggagactcaggatcagactagcaagaggtttaccccttttggtggaggatctagatgctgtcccggatctgaacttgccaagattgaggttgccttcttccttcaccaccttgttcagaacttcagatggacagccgaggatgctgaccaacccatggcatatccatacgttgaatttggaaaagggctgttgataaatttggatcgttgttccacctga

SEQ ID NO: 600 - protein, 472 aa, Populus balsamifera subsp. trichocarpa
  misc_feature: Ceres ANNOT ID no.1472214
  misc_feature: Bit score of 1199.0 for HMM based on sequences of FIGURE 7.
  misc_feature (218)..(455): Pfam Name: p450 Pfam Description: Cytochrome P450
  misc_feature: Functional Homolog Of Ceres SEEDLINE ID no. ME06336 at SEQ ID NO. 441
MAGELWVGVLVGITSGLLGLIMNHFLPMFLKLGHNVPKGSFGWPLLGETLGFLKPHPSNTLGAFLQDHCSRYGNVFKSHLFLSPTVVSCDQELNYFILQNEGKLFQCSYPKPIHGILGNVSMLVAVGDTHKRLRNVAISLVSITKSKPEFLNDIERTAIQILSSWKDKQQVVFCEEARKFSFNVIVKQVLGLTSEEPETREILEDFLTFMRGLVSIPLYIPGTPYARAVQARSRISSRVKAIIEERRSRNSRSLRNDFLEILLSVDTLSEDEKVSFVLDSLLGGYETTSLLMAMVVHLLGQSPTALEQLKLEHEQITSLKEKDECLNWEDYKTMEFTQNVISEALRYGNIVKFVHRKALKDVKFRDYLIPSGWKVLPVFTAVHLDSSVHANALQFHPWRWETQDQTSKRFTPFGGGSRCCPGSELAKIEVAFFLHHLVQNFRWTAEDADQPMAYPYVEFGKGLLINLDRCST

SEQ ID NO: 601 - protein, 480 aa, Solanum lycopersicum
  misc_feature: Public GI ID no.119224822
  misc_feature: Bit score of 1183.9 for HMM based on sequences of FIGURE 7.
  misc_feature (224)..(459): Pfam Name: p450 Pfam Description: Cytochrome P450
  misc_feature: Functional Homolog Of Ceres SEEDLINE ID no. ME06336 at SEQ ID NO. 441
MGEEGSLLIIVITLVFSFVIGITLNHFWPLFFNNYGTTLHVIPKGTFGWPLLGETLSFLKPHPSNSIGTFLQQHCSRYGKVFKSHLFFSPTVVSCDQDLNYFILQNEDKLFQCSYPKPIHGILGKVSLLVAVGDTHKRLRNVSLSLISTIKSKPEFINDVETLALQILQSWKDKHQVRYWEEARKFSFNVIVKQVLGLTPDNPQSALILQDFLAFMRGLISLPLYIPGTPYARAVQARSRISSTIKAIIEERRRKHVVDGDGKKNDFLEILLCVDTLSEEEKVSFVLDSLLGGYETTSLLMAMVVFFIGQSQTAFDRLKEEHDNIRSTKEKELLNWEDYQKMDFTQKVINEALRYGNVVKFVHRKALKDVKFKDYVIPAGWKVLPVFSAVHLDPSVHPNALHFNPWRWESDEQISKKLTPFGGGSRCCPGFELAKVEVAFFLHHLVQKYRWEVEEGEQPIAYPYVEFKNGLTIRLHKNST

SEQ ID NO: 602 - DNA, 1422 bp, Populus balsamifera subsp. trichocarpa
  misc_feature: Ceres ANNOT ID no.1440618
  misc_feature: Encodes the peptide sequence at SEQ ID NO. 603
atggctgagttttcgtccattggattagctctcattttaggactagttttggctttatttcttttacgctttttctcaagacaaaatcataaaaatttacctaatggtagcatgggatttccctttgtaggggaaactctttccttactgaagcctcattcatcaaactcaatgggaaccttcctgcaagaacgtgtttccagatatgggaaagttttcaaatcacatctatttggttctccagccatagtttcttgcgaccatgagctcaacatgtttatccttcaaaatgaagagaggttattcgaagccagctaccccaaggccatgcacgatattcttggaaaattctcattacttgttatctccggagacctccataggaagttaagaaattttgttgtcaccttcaacacagtgtccaagtcatccccaagattccttaattttgcagaaaatctagcaatcacaatgctggagtcatggaaaggctgtaaagaaatcgacttccttaaagatatcagaaagtttacacttagtctcatggtgaagagcgttttgagtattgaaccggaagaaccaagagccttgaagatattagatgattttcgaacttacatgaaaggctttgtgtctttgccattaaacttccctggatcatcttattccaaagctgtaaaggcaagaacaagacttgcttccaccatgaaagggattattaatgaaagggaaaaggagaaggtggggcttattacaggagacttcttagacgtgattttgtcaaaacgagggattctaaccgatggacagattgttagcgtggcgttggacatcttgctaggtggctatgagacaacctccatacttatagccttaattgtttactttcttgggcatgtaccgaaggcttttcagaccttaaaggaagaacatgacgcaattagaaaaagtaaacaggcgggggaacccttggacatggaagattacaggaaaatggagttcacgaaaaatgttatatatgagtctatgagatgcgggaatgtggtaaaattcttacaccgtaaagctattcaagatgtcaaatacaaagaatacttcattccatccggttggaaggttatacctgtgttatccggcccacatcttgatccatcccttcatgaaagtcctttgaaattcaatccctggagatggaaaaatcaagagactaggaaaacagtgatgccatttggtggtggaccacggttatgtccaggagccgaacttgccaaagtggagatagcatttttccttcatcatcttgtccttaattataggtggaaagtaaaagaagacgacttcccagttgcttatccttatgtggaattccgaagaggcttgctactggaggttgaaccagcacaggaagagtttagaaaatga

SEQ ID NO: 603 - protein, 473 aa, Populus balsamifera subsp. trichocarpa
  misc_feature: Ceres ANNOT ID no.1440618
  misc_feature: Bit score of 808.3 for HMM based on sequences of FIGURE 7.
  misc_feature (192)..(448): Pfam Name: p450 Pfam Description: Cytochrome P450
  misc_feature: Functional Homolog Of Ceres SEEDLINE ID no. ME06336 at SEQ ID NO. 441
MAEFSSIGLALILGLVLALFLLRFFSRQNHKNLPNGSMGFPFVGETLSLLKPHSSNSMGTFLQERVSRYGKVFKSHLFGSPAIVSCDHELNMFILQNEERLFEASYPKAMHDILGKFSLLVISGDLHRKLRNFVVTFNTVSKSSPRFLNFAENLAITMLESWKGCKEIDFLKDIRKFTLSLMVKSVLSIEPEEPRALKILDDFRTYMKGFVSLPLNFPGSSYSKAVKARTRLASTMKGIINEREKEKVGLITGDFLDVILSKRGILTDGQIVSVALDILLGGYETTSILIALIVYFLGHVPKAFQTLKEEHDAIRKSKQAGEPLDMEDYRKMEFTKNVIYESMRCGNVVKFLHRKAIQDVKYKEYFIPSGWKVIPVLSGPHLDPSLHESPLKFNPWRWKNQETRKTVMPFGGGPRLCPGAELAKVEIAFFLHHLVLNYRWKVKEDDFPVAYPYVEFRRGLLLEVEPAQEEFRK

SEQ ID NO: 604 - DNA, 1470 bp, Populus balsamifera subsp. trichocarpa
  misc_feature: Ceres ANNOT ID no.1510416
  misc_feature: Encodes the peptide sequence at SEQ ID NO. 605
atgtctcactcagagcttgttgtctttctccttccatcgattttatcactactcttgctcttcattctcgtgcaaagaaagcaagtaagatttaatctcccaccaggcaacatggggtggccatttcttggagaaaccattggctacctgaagccttactctgctacttcaataggagaattcatggaacagcacatatcaaggtatggaaagatttacaagtccaatttgtttggggagccaacaatagtatccgcagatgctggacttaacagatttatactacagaatgagggaagattatttgaatgcagctatccaaaaagtattggtggaattcttggaaaatggtccatgttggttcttgttggagacatgcatagagacatgaggattatatctcttaactttttgagccatgccaggttaagaactcatctattgaaagaagtggagaagcaaaccctgcttgttcttagctcttggaaggagaattgtacattttcagctcaagatgaagcaaagaagtttaccttcaatttgatggcaaaacatatcatgagcttggatcctggaaagccagagactgagcagctgaaaaaagagtatgttactttcatgaaaggagtagtttcagctcctataaatttgcctggaaccccatatagaaaagccttgaagtctcgatcaatcatcttgaaatttatagagcgaaagatggaggagagaattgctgaaacgaagggtggagtagaaaacttggaagacgatgatcttcttggatgggtcttgaagcattcaaatctttctacggagcaaatccttgacttaatcttaagcttgctctttgctggccacgaaacttcttctgtgtccatagctctagccatctacttcttgcaagcttgtcctggtgctattcaacagttaaaagaagaacatattcaaatctccagagccaagaaacggtcaggagagacggaattgaactgggatgattacaaaaaaatggaattcacccaatgcgttataagcgagacactgaggcttggaaacgtagtcaggtttcttcacagaaaagctctaaaagatgttcggtacaaagggtacgacattccatgtggatggaaagtgctaccagtgatctcagccgtccatttagattcaactcttttcgaccaacctcaacacttcaatccatggagatggcagcagcataacaatgctcgtggtgcttctacaagttcgagtgggacgacgagtagtaattacttcatgccatttgggggaggaccgcgactttgtgcaggatcggaattggcaaaactagaaatggccgtgttcatccaccatttggtcctcaacttccactgggaactggttgataccgatcaagcctttgcctttccttttgtcgattttcccaagggcttgcccataagagtcaagcacctactcacagttacatga

SEQ ID NO: 605 - protein, 489 aa, Populus balsamifera subsp. trichocarpa
  misc_feature: Ceres ANNOT ID no.1510416
  misc_feature: Bit score of 1119.5 for HMM based on sequences of FIGURE 7.
  misc_feature (265)..(465): Pfam Name: p450 Pfam Description: Cytochrome P450
  misc_feature: Functional Homolog Of Ceres SEEDLINE ID no. ME06336 at SEQ ID NO. 441
MSHSELVVFLLPSILSLLLLFILVQRKQVRFNLPPGNMGWPFLGETIGYLKPYSATSIGEFMEQHISRYGKIYKSNLFGEPTIVSADAGLNRFILQNEGRLFECSYPKSIGGILGKWSMLVLVGDMHRDMRIISLNFLSHARLRTHLLKEVEKQTLLVLSSWKENCTFSAQDEAKKFTFNLMAKHIMSLDPGKPETEQLKKEYVTFMKGVVSAPINLPGTPYRKALKSRSIILKFIERKMEERIAETKGGVENLEDDDLLGWVLKHSNLSTEQILDLILSLLFAGHETSSVSIALAIYFLQACPGAIQQLKEEHIQISRAKKRSGETELNWDDYKKMEFTQCVISETLRLGNVVRFLHRKALKDVRYKGYDIPCGWKVLPVISAVHLDSTLFDQPQHFNPWRWQQHNNARGASTSSSGTTSSNYFMPFGGGPRLCAGSELAKLEMAVFIHHLVLNFHWELVDTDQAFAFPFVDFPKGLPIRVKHLLTVT

SEQ ID NO: 606 - protein, 496 aa, Zinnia elegans
  misc_feature: Public GI ID no.71834076
  misc_feature: Bit score of 1218.9 for HMM based on sequences of FIGURE 7.
  misc_feature (44)..(467): Pfam Name: p450 Pfam Description: Cytochrome P450
  misc_feature: Functional Homolog Of Ceres SEEDLINE ID no. ME06336 at SEQ ID NO. 441
MCSTTLNMCDLEFFILASCLVLALFLILKLVKRRTNNGSTRNLPPGNMGWPFIGETIGYLQPYSATTIGKFMEQHISKYGKIYKSSLFGEPTIVSADPGLNKYILQNEGRLFECSYPRSIGGILGKWSMLVLVGDMHRDMRQISLNFLSNARLKTQLVNEVEKNTLWVLDSWKENSPFCAQEEAKKFTFNLMATHIMSLDPGEPETERLKKEYVTFMKGVVSPPLNFPGTAYWKALKSRATILKFIETKMEERIRMDEGNGLGKLDNDLLGWSMKNSNLTKEQILDLVLSLLFAGHETSSVSISLAVYFLEACPTAVRQLREEHEEIVMKKKLLGEKYLTWDDYKKMEFTQCVINETLRFGNVVRFLHRKAIKDVRYKGYDIPCGWKVLPVIAAVHLDPTHFDQPYLFDPWRWQNASVTSSTCSTPPSASNFMPFGGGPRLCTGSELAKLEMAIFIHHLVLKYEWELVDSDEAFAYPYLDFPKGLPIKIRHRKQSC

SEQ ID NO: 607 - DNA, 1470 bp, Populus balsamifera subsp. trichocarpa
  misc_feature: Ceres ANNOT ID no.1541253
  misc_feature: Encodes the peptide sequence at SEQ ID NO. 608
atgtctcactcagagcttgttgtgcttctccttccttcaattttatctctactcctggtcttcattctcatgcaaagaaagcaagcaagatttaatctcccacctggcaacatgggctggccatttcttggagaaactattggctacttgaagccttactctgctacttcaataggggaattcatggaacaacacatatcaaggtatggaaagatttacaagtccaatttgtttggggagccgacaatagtatctgcagatgctggacttaacagatttatactccagagtgaaggaagattgtttgaatgcagctatccaagaagtattggtggaattcttggaaaatggtctatgctggttctagttggagacatgcatagaaacatgaggagtatatctctcaactttttgagccatgccaggttaagaagtcatctattgaaagaagtggagaagcaaaccttgcttgttcttagttcttggaaggagaattgtacattttcagctcaagatgaagcaaagaagtttaccttcaatttgatggcaaaacatatgatgagcttggatcctggaaagccagagactgagcagctgaagaaagagtatgttactttcatgaaaggagtggtttctgctccactaaattttcctggaacaccgtatagaaaagccttgaagtctcgatcaatcatccttaaatttatagagcaaaaaatggaagagagaattgctagattgaaggagggagtggaagatttagaggaagatgatcttcttggatgggttttgaagcattcaaatctttctaccgagcaaatccttgacttgatattaagcttgctctttgctggccatgaaacttcttctgtctccatagctttagccatctacttcttgcaagcttgtcccggtgctattcaacagttaaaagaagaacatattgaaatttccagagccaagaaacagtcaggagagatggaaataaactgggatgattacaaaaaaatggaattcactcaatgtgttataagtgagacactgaggcttggaaacgtagtcaggttccttcatagaaaagctgtcagagatgttcgctataaagggtatgacattccatgtggatggaaagtgctgccagtgatctcagccgtgcatttagattctactgtttttgaccagcctcaacagttcaatccatggagatggcagcagcacaacaatgctcgtggatcttctacttgttcgagtgcggcggcggcgagtagtaatcacttcatgccatttgggggaggaccgcgactctgtgcaggatcggaattggcaaaacttgaaatggcagttttcattcaccatttggttctgaacttccattgggaattggtcggtgccgatcaagcctttgcctttccttttgttgattttcctaaaggcttgccaataagagtcaagcaccacacagtcatataa

SEQ ID NO: 608 - protein, 489 aa, Populus balsamifera subsp. trichocarpa
  misc_feature: Ceres ANNOT ID no.1541253
  misc_feature: Bit score of 1104.8 for HMM based on sequences of FIGURE 7.
  misc_feature (265)..(461): Pfam Name: p450 Pfam Description: Cytochrome P450
  misc_feature: Functional Homolog Of Ceres SEEDLINE ID no. ME06336 at SEQ ID NO. 441
MSHSELVVLLLPSILSLLLVFILMQRKQARFNLPPGNMGWPFLGETIGYLKPYSATSIGEFMEQHISRYGKIYKSNLFGEPTIVSADAGLNRFILQSEGRLFECSYPRSIGGILGKWSMLVLVGDMHRNMRSISLNFLSHARLRSHLLKEVEKQTLLVLSSWKENCTFSAQDEAKKFTFNLMAKHMMSLDPGKPETEQLKKEYVTFMKGVVSAPLNFPGTPYRKALKSRSIILKFIEQKMEERIARLKEGVEDLEEDDLLGWVLKHSNLSTEQILDLILSLLFAGHETSSVSIALAIYFLQACPGAIQQLKEEHIEISRAKKQSGEMEINWDDYKKMEFTQCVISETLRLGNVVRFLHRKAVRDVRYKGYDIPCGWKVLPVISAVHLDSTVFDQPQQFNPWRWQQHNNARGSSTCSSAAAASSNHFMPFGGGPRLCAGSELAKLEMAVFIHHLVLNFHWELVGADQAFAFPFVDFPKGLPIRVKHHTVI

SEQ ID NO: 609 - protein, 480 aa, Hordeum vulgare subsp. vulgare
  misc_feature: Public GI ID no.116876026
  misc_feature: Bit score of 1114.1 for HMM based on sequences of FIGURE 7.
  misc_feature (334)..(453): Pfam Name: p450 Pfam Description: Cytochrome P450
  misc_feature: Functional Homolog Of Ceres SEEDLINE ID no. ME06336 at SEQ ID NO. 441
MSMTVGDLVLAAPAILLALLLALVLSHFLPLLLNPKAPRGSFGWPLVGETLKFLTPHASNTLGSFLEDHCSRYGRVFKSHLFCTPTVVSCDQEVSRFVLQSDARSFVPWYPRSLTELMGKSSILLINGSLQRRVHGLVGAFFKSPQLKAQVTADMQRRLAPALAAWREQGPGARLRIQDHAKTIVFQILVRGLIGLEAGPEMQQLKQQFQEFIVGLMSLPIKLPGTRLYRSLQAKKRMARVIQRIIQDKRRRRRALDEAPPARDAIDVLMGDGSEELTDELISDNMIDLMIPAEDSVPVLITLAVKFLSECPLALQQLEEENMQLKMRKAGLGETLQWTDYMSLSFTQHVITETLRMGNIISGIMRKAVRDVEVKGHLIPKGWCVFMYFRSVHLDDMLYEDPCKFNPWRWKEKDVSASSFTPFGGGQRLCPGLDLARLEASIFLHHLVTSFRWVAEEDHIVNFPTVRLKGGMPIRVTARD

SEQ ID NO: 610 - protein, 485 aa, Gossypium hirsutum
  misc_feature: Public GI ID no.116248050
  misc_feature: Bit score of 1188.3 for HMM based on sequences of FIGURE 7.
  misc_feature (217)..(465): Pfam Name: p450 Pfam Description: Cytochrome P450
  misc_feature: Functional Homolog Of Ceres SEEDLINE ID no. ME06336 at SEQ ID NO. 441
MPDSEPIFLLLPSILSLILFFILIKRKQRRYNLPPGNMGWPFLGETIGYLRPYSATSVGEFMHQHISRYGNIYKSNLFGEKTIVSADAGLNKFILQNEGRLFECSYPRSIGGILGKWSMLVLVGDMHRDMRIISLNFLSNARLRTHLLREVEKHTLLVLNTWKEKCIFSAQDEAKKFTFNLVAKNIMSMDPGHPETEQLKKEYVTFMKGVVSAPLNLPGTAYRKALQSRSTILKFIEKKMEVRIRKMKEGKENSEEDDLLEWVLKHSNLSTEQILDLILSLLFAGHETSSVAITLAIYFLPGCPLAIQQLREEHLEVARAKNQSGETELNWDDYKKMEFTQCVINETLRLGNVVRFLHRKALKDIRYKGYDIPCGWKVLPVIAAVHLDPCLFDHPQLFNPWRWQQNNGSRGAGTATSSASSSNYFMPFGGGPRLCAGTELAKLEMAVFIHHLVLNYQWELADTDEAFAFPFVDFPKGLPIRVFKS

SEQ ID NO: 611 - protein, 491 aa, Solanum lycopersicum
  misc_feature: Public GI ID no.119224824
  misc_feature: Bit score of 1041.8 for HMM based on sequences of FIGURE 7.
  misc_feature (217)..(459): Pfam Name: p450 Pfam Description: Cytochrome P450
  misc_feature: Functional Homolog Of Ceres SEEDLINE ID no. ME06336 at SEQ ID NO. 441
MSDLEFFLFLIPPILAVLIILNLFKRKHNFQNLPPGDMGWPFLGETIGYLRPYSATTIGDFMQDHISRYGKIFKSNLFGEPTIVSADAGLNRYILQNEGRLFECNYPRSIGGILGKWSMLVQVGQMHRDMRMIPLNFLSNARLRNQLLSEVEKHTLLVLGSWKQDSVVCAQDEAKKLTFNFMAEHIMSLQPGNPETEKLKKEYITFMKGVVSAPLNFPGTAYRKALQSRSTILGFIERKMEERLKEMNRNENDLLGWVLKNSNLSKEQILDLLLSLLFAGHETSSVAIALSIFLLESCPAAVQQLTEEHLEISRAKKQSGETELNWDDYKKMEFTQCVINETLRLGNVVRFLHRKAVKDVRYKGYDIPCGWKVLPVISAAHLDPSLFDRPHDFDPWRWQNAEESPSGKGGSTGTSSTTKSSNNFMPFGGGPRLCAGSELAKLEMAIFIHYLVLNFHWKLAATDQAFAYPYVDFPNALPINIQHRSLNKLHD

SEQ ID NO: 612 - DNA, 2061 bp, Gossypium hirsutum
  misc_feature: Ceres CLONE ID no.1918218
  misc_feature: Encodes the peptide sequence at SEQ ID NO. 613
attagatagtcagtaagcttattggctaattctaaattctaaattctaagcttttttcgtttaagtagctgccgcaagtgactctaaatactccagaaatgatctccttttcaagaaaaacaccaacaaaagtagatatctgatttctttcttggaaagctaagctaagcaaagcaaaaaaagaaaaacaagtgggagtgggaaaggattgaagaagaaaaaagggtcggtctccatgcctgactcagagcctattttcttgcttctaccatctattttatctttgattctgttcttcattctcatcaagagaaagcaaagaaggtataatcttccaccagggaacatggggtggccttttctcggcgaaacaatcggttacttgaggccttactctgctacttcagtaggtgaattcatgcaccagcatatatcaaggtatgggaatatctacaaatcgaatttgtttggtgagaagacaatagtgtctgcagatgctgggttgaacaagttcatattacaaaacgaagggagattattcgagtgcagttacccgagaagcattggtggcattcttgggaaatggtcgatgctggttttggttggggatatgcatagagacatgaggattatatcactcaacttcttgagcaacgccaggctgaggactcatcttttgagagaagtggagaaacatactttgcttgttctaaatacttggaaagagaagtgcatattttcagctcaggatgatgcaaaaaagttcactttcaatttgatggcaaaaaatatcatgagcatggaccctggacatccagagacggagcagctaaagaaagaatatgttactttcatgaaaggagtcgtttctgctcctttaaatttacctggaactgcatacagaaaagccttacaatctcgatcaacaatcctgaaatttattgaaaagaaaatggaagtaaggataaggaaaatgaaggaaggaaaagaaaactcagaggaagatgatcttcttgaatgggtcttaaagcattctaatctttccacagagcaaatccttgacttgattttgagcttgctttttgctggacatgagacttcctcggtagccataaccttagccatctacttcttgccaggttgtcctttggccattcaacagttgagagaagaacaccttgaagttgccagagccaagaaccaatcaggagagactgaactcaactgggatgattacaagaaaatggagttcactcaatgtgttattaacgagacacttaggcttggtaatgtcgtcagatttctccacagaaaagctctcaaagatattagatataaaggttatgatattccatgtgggtggaaagtgcttccagtgattgcagcagtgcacttggatccctgtctttttgaccaccctcaactcttcaatccatggcgatggcagcaaaataatgggagtcgaggggcggggacggcaacgtcatcagcgagcagcagcaattacttcatgccattcgggggaggaccacggctatgtgcaggaacagagctggctaaactggaaatggcggtgttcatccaccatttggtcctcaactaccagtgggagttagccgatacggatgaagcctttgccttcccttttgtcgacttccctaaaggcctacccatcagagtcttcaaatcttaaaacagacatctcaggcaggcaggcaggcaggcaggctcagccgctcgtgttgctgcatatatttatatatagtagatatataggcattaatttaaaagtggacccccaagctacctactatcaccattcttctgcagtactgtacgtacgtgaagacaaagacgatagtggctttcgtatttttcaacgttctagttgttccacatttatatatatagtataattacatgaagaaaaagggaagacaaaacagattcaaagtatatatttatatatatatatattcatatccaccatattaatgtaaatttttattttattttggtcccttctgggagataattattattattactattcatttatcg

SEQ ID NO: 613 - protein, 485 aa, Gossypium hirsutum
  misc_feature: Ceres CLONE ID no.1918218
  misc_feature: Bit score of 1185.7 for HMM based on sequences of FIGURE 7.
  misc_feature (217)..(465): Pfam Name: p450 Pfam Description: Cytochrome P450
  misc_feature: Functional Homolog Of Ceres SEEDLINE ID no. ME06336 at SEQ ID NO. 441
MPDSEPIFLLLPSILSLILFFILIKRKQRRYNLPPGNMGWPFLGETIGYLRPYSATSVGEFMHQHISRYGNIYKSNLFGEKTIVSADAGLNKFILQNEGRLFECSYPRSIGGILGKWSMLVLVGDMHRDMRIISLNFLSNARLRTHLLREVEKHTLLVLNTWKEKCIFSAQDDAKKFTFNLMAKNIMSMDPGHPETEQLKKEYVTFMKGVVSAPLNLPGTAYRKALQSRSTILKFIEKKMEVRIRKMKEGKENSEEDDLLEWVLKHSNLSTEQILDLILSLLFAGHETSSVAITLAIYFLPGCPLAIQQLREEHLEVARAKNQSGETELNWDDYKKMEFTQCVINETLRLGNVVRFLHRKALKDIRYKGYDIPCGWKVLPVIAAVHLDPCLFDHPQLFNPWRWQQNNGSRGAGTATSSASSSNYFMPFGGGPRLCAGTELAKLEMAVFIHHLVLNYQWELADTDEAFAFPFVDFPKGLPIRVFKS

SEQ ID NO: 614 - protein, 502 aa, Oryza sativa subsp. japonica
  misc_feature: Public GI ID no.115451693
  misc_feature: Bit score of 938.3 for HMM based on sequences of FIGURE 7.
  misc_feature (237)..(475): Pfam Name: p450 Pfam Description: Cytochrome P450
  misc_feature: Functional Homolog Of Ceres SEEDLINE ID no. ME06336 at SEQ ID NO. 441
MASITSELLFFLPFILLALLTFYTTTVAKCHGGHWWRGGTTPAKRKRMNLPPGAAGWPLVGETFGYLRAHPATSVGRFMEQHIARYGKIYRSSLFGERTVVSADAGLNRYILQNEGRLFECSYPRSIGGILGKWSMLVLVGDPHREMRAISLNFLSSVRLRAVLLPEVERHTLLVLRAWPPSSTFSAQHQAKKFTFNLMAKNIMSMDPGEEETERLRREYITFMKGVVSAPLNLPGTPYWKALKSRAAILGVIERKMEERVEKLSKEDASVEQDDLLGWALKQSNLSKEQILDLLLSLLFAGHETSSMALALAIFFLEGCPKAVQELREEHLGIARRQRLRGECKLSWEDYKEMVFTQCVINETLRLGNVVRFLHRKVIKDVHYKGYDIPSGWKILPVLAAVHLDSSLYEDPQRFNPWRWKSSGSSGGLAQSSSFMPYGGGTRLCAGSELAKLEMAVFLHHLVLNFRWELAEPDQAFVFPFVDFPKGLPIRVHRIAQDDEQE

SEQ ID NO: 615 - protein, 506 aa, Oryza sativa subsp. japonica
  misc_feature: Public GI ID no.60677681
  misc_feature: Bit score of 938.3 for HMM based on sequences of FIGURE 7.
  misc_feature (241)..(479): Pfam Name: p450 Pfam Description: Cytochrome P450
  misc_feature: Functional Homolog Of Ceres SEEDLINE ID no. ME06336 at SEQ ID NO. 441
MAAMMASITSELLFFLPFILLALLTFYTTTVAKCHGGHWWRGGTTPAKRKRMNLPPGAAGWPLVGETFGYLRAHPATSVGRFMEQHIARYGKIYRSSLFGERTVVSADAGLNRYILQNEGRLFECSYPRSIGGILGKWSMLVLVGDPHREMRAISLNFLSSVRLRAVLLPEVERHTLLVLRAWPPSSTFSAQHQAKKFTFNLMAKNIMSMDPGEEETERLRREYITFMKGVVSAPLNLPGTPYWKALKSRAAILGVIERKMEERVEKLSKEDASVEQDDLLGWALKQSNLSKEQILDLLLSLLFAGHETSSMALALAIFFLEGCPKAVQELREEHLGIARRQRLRGECKLSWEDYKEMVFTQCVINETLRLGNVVRFLHRKVIKDVHYKGYDIPSGWKILPVLAAVHLDSSLYEDPQRFNPWRWKSSGSSGGLAQSSSFMPYGGGTRLCAGSELAKLEMAVFLHHLVLNFRWELAEPDQAFVFPFVDFPKGLPIRVHRIAQDDEQE

SEQ ID NO: 616 - protein, 502 aa, Oryza sativa subsp. indica
  misc_feature: Public GI ID no.125542982
  misc_feature: Bit score of 937.8 for HMM based on sequences of FIGURE 7.
  misc_feature (237)..(475): Pfam Name: p450 Pfam Description: Cytochrome P450
  misc_feature: Functional Homolog Of Ceres SEEDLINE ID no. ME06336 at SEQ ID NO. 441
MASITSELLFFLPFILLALLTFYTTTVAKCHGGHWWRGGTTPAKRKRMNLPPGAAGWPLVGETFGYLRAHPATSVGRFMEQHIARYGKIYRSSLFGERTVVSADAGLNRYILQNEGRLFECSYPRSIGGILGKWSMLVLVGDPHREMRAISLNFLSSVRLRAVLLPEVERHTLLVLRAWLPSSTFSAQHQAKKFTFNLMAKNIMSMDPGEEETERLRREYITFMKGVVSAPLNLPGTPYWKALKSRAAILGVIERKMEERVEKLSKEDASVEQDDLLGWALKQSNLSKEQILDLLLSLLFAGHETSSMALALAIFFLEGCPKAVQELREEHLGIARRQRLRGECKLSWEDYKEMVFTQCVINETLRLGNVVRFLHRKVIKDVHYKGYDIPSGWKILPVLAAVHLDSSLYEDPQRFNPWRWKSSGSSGGLAQSSSFMPYGGGTRLCAGSELAKLEMAVFLHHLVLNFRWELAEPDQAFVFPFVDFPKGLPIRVHRIAQDDEQE

SEQ ID NO: 617 - protein, 513 aa, Arabidopsis thaliana
  misc_feature: Public GI ID no.71152350
  misc_feature: Bit score of 1029.3 for HMM based on sequences of FIGURE 7.
  misc_feature (292)..(493): Pfam Name: p450 Pfam Description: Cytochrome P450
  misc_feature: Functional Homolog Of Ceres SEEDLINE ID no. ME06336 at SEQ ID NO. 441
MFETEHHTLLPLLLLPSLLSLLLFLILLKRRNRKTRFNLPPGKSGWPFLGETIGYLKPYTATTLGDFMQQHVSKYGKIYRSNLFGEPTIVSADAGLNRFILQNEGRLFECSYPRSIGGILGKWSMLVLVGDMHRDMRSISLNFLSHARLRTILLKDVERHTLFVLDSWQQNSIFSAQDEAKKFTFNLMAKHIMSMDPGEEETEQLKKEYVTFMKGVVSAPLNLPGTAYHKALQSRATILKFIERKMEERKLDIKEEDQEEEEVKTEDEAEMSKSDHVRKQRTDDDLLGWVLKHSNLSTEQILDLILSLLFAGHETSSVAIALAIFFLQACPKAVEELREEHLEIARAKKELGESELNWDDYKKMDFTQCVINETLRLGNVVRFLHRKALKDVRYKGYDIPSGWKVLPVISAVHLDNSRYDQPNLFNPWRWQQQNNGASSSGSGSFSTWGNNYMPFGGGPRLCAGSELAKLEMAVFIHHLVLKFNWELAEDDQPFAFPFVDFPNGLPIRVSRIL

SEQ ID NO: 618 - protein, 513 aa, Arabidopsis thaliana
  misc_feature: Public GI ID no.15229822
  misc_feature: Bit score of 1028.6 for HMM based on sequences of FIGURE 7.
  misc_feature (292)..(493): Pfam Name: p450 Pfam Description: Cytochrome P450
  misc_feature: Functional Homolog Of Ceres SEEDLINE ID no. ME06336 at SEQ ID NO. 441
MFETEHHTLLPLLLLPSLLSLLLFLILLKRRNRKTRFNLPPGKSGWPFLGETIGYLKPYTATTLGDFMQQHVSKYGKIYRSNLFGEPTIVSADAGLNRFILQNEGRLFECSYPRSIGGILGKWSMLVLVGDMHRDMRSISLNFLSHARLRTILLKDVERHTLFVLDSWQQNSIFSAQDEAKKFTFNLMAKHIMSMDPGEEETEQLKKEYVTFMKGVVSAPLNLPGTAYHKALQSRATILKFIERKMEERKLDIKEEDQEEEEVKTEDEAEMSKSDHVRKQRTDDDLLGWVLKHSNLSTEQILDLILSLLFAGHETSSVAIALAIFFLQACPKAVEELREEHLEIARAKKELGESELNWDDYKKMDFTQCVINETLRLGNVVRFLHRKALKDVRYKGYDIPSGWKVLPVISAVHLDNSRYDQPNLFNPWRWQQQNNGASSSGSGSFSTWGNNYMPFGGGPRLCAGSELAKLEMAVFIHHLVLKFNWELAEDDKPFAFPFVDFPNGLPIRVSRIL

SEQ ID NO: 619 - DNA, 2021 bp, Zea mays
  misc_feature: Ceres CLONE ID no.1578373
  misc_feature: Encodes the peptide sequence at SEQ ID NO. 620
agacgaagtggggcgcctagcttcttactagttttttttttccttgcgcaaagcttgcacttgctgagagagagggagagagaaatccagagataaaggcgcttcattcattccctctcctgctttctctctccaacccatccgtcctctctctccacacataaaaaccaacgaagcgggcgagtgatcaggcagaggcagcaggcaggaaataaatttgaagaaagctagacctctgatcagcaggagctcatgggcgccatgatggcctccataaccagcgagctcctcttcttccttcccttcatcctgctggccctcctcgccttgtacaccaccaccgtcgccaaatgccacggcacccacccgtggcgccgtcagaagaagaagcggcccaacctgcccccgggcgcccgcggatggcccttggtcggcgaaactttcggctacctccgcgcccacccggccacctccgtgggccgcttcatggagcggcatgtcgcacggtacgggaagatataccggtcgagcctgttcggggagcggacggtggtgtcggcggacgcggggctgaaccgctacatcctgcagaacgaggggcggctgttcgagtgcagctacccgcgcagcatcggcggcatcctgggcaagtggtccatgctggtgctcgtgggcgacgcgcaccgcgagatgcgcgctatctcgctcaacttcctcagctccgtccgcctccgcgccgtgctgctccccgaggtggagcgccacaccctgctggtcctccgctcgtggccgccctccgacggcaccttctccgcccagcacgaagccaagaagttcacgtttaacctgatggcgaagaacataatgagcatggaccccggcgaggaggagacggagcggctgcggctggagtacatcaccttcatgaagggcgtcgtgtcagcgccgctcaacttcccgggcacggcctactggaaggcgctcaagtcgcgcgcgtccatacttggagtgatagagaggaagatggaggacaggcttgagaagatgagcagggagaagtcaagcgtggaggaggacgaccttcttggatgggccctgaagcaatccaacctgtccaaggaacagatcctggacctcttgctgagcctgctcttcgcggggcacgagacttcgtccatggcgctcgccctcgccatcttcttcctcgaagggtgccctaaggccgtgcaagaactccgggaggagcatctcctgattgctaggagacaaaggctaaggggggcgtccaaattgagctgggaagactacaaggaaatggttttcacgcagtgtgttataaacgagacattgcggctcggcaacgtggtcaggttcctgcaccggaaggtcatccgagatgtacactacaatgggtacgacataccgcgggggtggaaaatcctgccggttctagcggcggtgcacctggactcgtcgctgtacgaggaccccagccggttcaacccttggagatggaagagcaacaacgcgccaagcagcttcatgccgtacggcggcgggccgcggctgtgcgccgggtcggagctggccaagctggagatggccatcttcctgcaccacctggtgctcaacttccggtgggagctggcggagccggaccaggccttcgtctaccctttcgtcgacttccccaagggcctcccgatcagggtccagcgggtcgccgacgaccaaggccatcgtagcgttttgaccgagagcacaagaggctgagagggaggaggcagttcaatttttcgttgcattttgagggctgtggtctcgtgttttatgtagattgtgattattattattatacatactaaaacaagatagaagcacgtatagacagagcaaagaggaggatggtccaaaagtgtttggggtagataaaatgtgtactcactagggttgtaataaggccggtccatggcccatgtcaagtaatactagagatatatagaatatagtggatatccaac

SEQ ID NO: 620 - protein, 502 aa, Zea mays
  misc_feature: Ceres CLONE ID no.1578373
  misc_feature: Bit score of 932.8 for HMM based on sequences of FIGURE 7.
  misc_feature (279)..(466): Pfam Name: p450 Pfam Description: Cytochrome P450
  misc_feature: Functional Homolog Of Ceres SEEDLINE ID no. ME06336 at SEQ ID NO. 441
MASITSELLFFLPFILLALLALYTTTVAKCHGTHPWRRQKKKRPNLPPGARGWPLVGETFGYLRAHPATSVGRFMERHVARYGKIYRSSLFGERTVVSADAGLNRYILQNEGRLFECSYPRSIGGILGKWSMLVLVGDAHREMRAISLNFLSSVRLRAVLLPEVERHTLLVLRSWPPSDGTFSAQHEAKKFTFNLMAKNIMSMDPGEEETERLRLEYITFMKGVVSAPLNFPGTAYWKALKSRASILGVIERKMEDRLEKMSREKSSVEEDDLLGWALKQSNLSKEQILDLLLSLLFAGHETSSMALALAIFFLEGCPKAVQELREEHLLIARRQRLRGASKLSWEDYKEMVFTQCVINETLRLGNVVRFLHRKVIRDVHYNGYDIPRGWKILPVLAAVHLDSSLYEDPSRFNPWRWKSNNAPSSFMPYGGGPRLCAGSELAKLEMAIFLHHLVLNFRWELAEPDQAFVYPFVDFPKGLPIRVQRVADDQGHRSVLTESTRG

SEQ ID NO: 621 - DNA, 1897 bp, Zea mays
  misc_feature: Ceres CLONE ID no.1583137
  misc_feature: Encodes the peptide sequence at SEQ ID NO. 622
gacgaagtggggcgcctagcttcttactagttttttttccttgcgcaaagcttgcacttgctgagagagagggagagagaaatccagagataaaggcgcttcattcattccctctcctgctttctctctccaacccatccgtcctctctctccacacataaaaaccaacgaagcgggcgagtgatcaggcagaggcagcaggcaggaaataaatttgaagaaagctagacctctgatcagcaggagctcatgggcgccatgatggcctccataaccagcgagctcctcttcttccttcccttcatcctgctggccctcctcgccttgtacaccaccaccgtcgccaaatgccacggcacccaccagtggcgccgtcagaagaagaagcggcccaacctgcccccgggcgcccgcggatggcccttggtcggcgagactttcggctacctccgcgcccacccggccacctccgtgggccgcttcatggagcggcatgtcgcacggtacgggaagatataccggtcgtgcctgttcggggagcggacggtggtgtcggcggacgcggggctgaaccgctacatcctgcagaacgaggggcggctgttcgagtgcagctacccgcgcagcatcggcggcatcctgggcaagtggtccatgctggtgctcgtgggcgacgcgcaccgcgagatgcgcgctatctcgctcaacttcctcagctccgtccgcctccgcgccgtgctgctccccgaggtggagcgccacaccctgctggtcctccgctcgtggccgccctccgacggcaccttctccgcccagcacgaagccaagaagttcacgtttaacctgatggcgaagaacataatgagcatggaccccggcgaggaggagacggagcggctgcggctggagtacatcaccttcatgaagggcgtcgtgtcagcgccgctcaacttcccgggcacggcctactggaaggcgctcaagtcacgcgcgtccatacttggagtgatagagaggaagatggaggacaggcttgagaagatgagcagggagaagtcaagcgtggaggaggacgaccttcttggatgggccctgaagcaatccaacctgtccaaggaacagatcctggacctcttgctgagcctgctcttcgcggggcacgagacttcgtccatggcgctcgccctcgccatcttcttcctcgaagggtgccctaaggccgtgcaagaactccgggaggagcatctcctgattgctaggagacaaaggctaagaggggcgtctaaattgagctgggaagactgcaaggaaatggttttcacgcagtgtgttataaacgagacattgcggctcggcaacgtggtcaggttcctgcaccggaaggtcatccgagatgtacactacaatgggtacgacataccgcgggggtggaaaatcctgccggttctagcggcggtgcacctggactcgtcgctgtacgaggaccccagccggttcaacccttggagatggaagctgcagagcaacaacgcgccaagcagcttcatgccgtacggcggcgggccgcggctgtgcgccgggtcggagctggccaagctggagatggccatcttcctgcaccacctggtgctcaacttccggtgggagctggcggagccggaccaggccttcgtctaccctttcgtcgacttccccaagggcctcccgatcagggtccagcgggtcgccgacgaccaaggccatcgtagcgttttgaccgagagcacaagaggctgagagggaggaggcagttcaatttttcgttgcattttgagggctgtggtctcgtgttttatgtagattgtgattattattattatacatactaaaacaagatagaagcacgtatagacagagc

SEQ ID NO: 622 - protein, 504 aa, Zea mays
  misc_feature: Ceres CLONE ID no.1583137
  misc_feature: Bit score of 920.0 for HMM based on sequences of FIGURE 7.
  misc_feature (279)..(468): Pfam Name: p450 Pfam Description: Cytochrome P450
  misc_feature: Functional Homolog Of Ceres SEEDLINE ID no. ME06336 at SEQ ID NO. 441
MASITSELLFFLPFILLALLALYTTTVAKCHGTHQWRRQKKKRPNLPPGARGWPLVGETFGYLRAHPATSVGRFMERHVARYGKIYRSCLFGERTVVSADAGLNRYILQNEGRLFECSYPRSIGGILGKWSMLVLVGDAHREMRAISLNFLSSVRLRAVLLPEVERHTLLVLRSWPPSDGTFSAQHEAKKFTFNLMAKNIMSMDPGEEETERLRLEYITFMKGVVSAPLNFPGTAYWKALKSRASILGVIERKMEDRLEKMSREKSSVEEDDLLGWALKQSNLSKEQILDLLLSLLFAGHETSSMALALAIFFLEGCPKAVQELREEHLLIARRQRLRGASKLSWEDCKEMVFTQCVINETLRLGNVVRFLHRKVIRDVHYNGYDIPRGWKILPVLAAVHLDSSLYEDPSRFNPWRWKLQSNNAPSSFMPYGGGPRLCAGSELAKLEMAIFLHHLVLNFRWELAEPDQAFVYPFVDFPKGLPIRVQRVADDQGHRSVLTESTRG

SEQ ID NO: 623 - DNA, 1599 bp, Populus balsamifera subsp. trichocarpa
  misc_feature: Ceres ANNOT ID no.1487841
  misc_feature: Encodes the peptide sequence at SEQ ID NO. 624
atgtctcactcagagcttgttgtgcttctccttccttcaattttatctctactcctggtcttcattctcatgcaaagaaagcaagcaagatttaatctcccacctggcaacatgggctggccatttcttggagaaactattggctacttgaagccttactctgctacttcaataggggaattcatggaacaacacatatcaaggtatggaaagatttacaagtccaatttgtttggggagccgacaatagtatctgcagatgctggacttaacagatttatactccagagtgaaggaagattgtttgaatgcagctatccaagaagtattggtggaattcttggaaaatggtctatgctggttctagttggagacatgcatagaaacatgaggagtatatctctcaactttttgagccatgccaggttaagaagtcatctattgaaagaagtggagaagcaaaccttgcttgttcttagttcttggaaggagaattgtacattttcagctcaagatgaagcaaagaagtttaccttcaatttgatggcaaaacatatgatgagcttggatcctggaaagccagagactgagcagctgaagaaagagtatgttactttcatgaaaggagtggtttctgctccactaaattttcctggaacaccgtatagaaaagccttgaagtctcgatcaatcatccttaaatttatagagcaaaaaatggaagagagaattgctagattgaaggagggagtggaagatttagaggaagatgatcttcttggatgggttttgaagcattcaaatctttctaccgagcaaatccttgacttgatattaagcttgctctttgctggccatgaaacttcttctgtctccatagctttagccatctacttcttgcaagcttgtcccggtgctattcaacagttaaaagaagaacatattgaaatttccagagccaagaaacagtcaggagagatggaaataaactgggatgattacaaaaaaatggaattcactcaatgtgttataagtgagacactgaggcttggaaacgtagtcaggttccttcatagaaaagctgtcagagatgttcgctataaagggtatgacattccatgtggatggaaagtgctgccagtgatctcagccgtgcatttagattctactgtttttgaccagcctcaacagttcaatccatggagatggcagattttggcatcatcaacagggtctcctgactgtgtttggttttttgctacacgtatctccattttagcgttcaatgcaagggttgattccatgacatttggacaacgaaagctcccgtggtctgcccttcagcacaacaatgctcgtggatcttctacttgttcgagtgcggcggcggcgagtagtaatcacttcatgccatttgggggaggaccgcgactctgtgcaggatcggaattggcaaaacttgaaatggcagttttcattcaccatttggttctgaacttccattgggaattggtcggtgccgatcaagcctttgcctttccttttgttgattttcctaaaggcttgccaataagagtcaagcaccacacagtcatataa

SEQ ID NO: 624 - protein, 532 aa, Populus balsamifera subsp. trichocarpa
  misc_feature: Ceres ANNOT ID no.1487841
  misc_feature: Bit score of 1056.4 for HMM based on sequences of FIGURE 7.
  misc_feature (265)..(403): Pfam Name: p450 Pfam Description: Cytochrome P450
  misc_feature: Functional Homolog Of Ceres SEEDLINE ID no. ME06336 at SEQ ID NO. 441
MSHSELVVLLLPSILSLLLVFILMQRKQARFNLPPGNMGWPFLGETIGYLKPYSATSIGEFMEQHISRYGKIYKSNLFGEPTIVSADAGLNRFILQSEGRLFECSYPRSIGGILGKWSMLVLVGDMHRNMRSISLNFLSHARLRSHLLKEVEKQTLLVLSSWKENCTFSAQDEAKKFTFNLMAKHMMSLDPGKPETEQLKKEYVTFMKGVVSAPLNFPGTPYRKALKSRSIILKFIEQKMEERIARLKEGVEDLEEDDLLGWVLKHSNLSTEQILDLILSLLFAGHETSSVSIALAIYFLQACPGAIQQLKEEHIEISRAKKQSGEMEINWDDYKKMEFTQCVISETLRLGNVVRFLHRKAVRDVRYKGYDIPCGWKVLPVISAVHLDSTVFDQPQQFNPWRWQILASSTGSPDCVWFFATRISILAFNARVDSMTFGQRKLPWSALQHNNARGSSTCSSAAAASSNHFMPFGGGPRLCAGSELAKLEMAVFIHHLVLNFHWELVGADQAFAFPFVDFPKGLPIRVKHHTVI

SEQ ID NO: 625 - protein, 526 aa, Oryza sativa subsp. japonica
  misc_feature: Public GI ID no.125585475
  misc_feature: Bit score of 834.8 for HMM based on sequences of FIGURE 7.
  misc_feature (237)..(397): Pfam Name: p450 Pfam Description: Cytochrome P450
  misc_feature: Functional Homolog Of Ceres SEEDLINE ID no. ME06336 at SEQ ID NO. 441
MASITSELLFFLPFILLALLTFYTTTVAKCHGGHWWRGGTTPAKRKRMNLPPGAAGWPLVGETFGYLRAHPATSVGRFMEQHIARYGKIYRSSLFGERTVVSADAGLNRYILQNEGRLFECSYPRSIGGILGKWSMLVLVGDPHREMRAISLNFLSSVRLRAVLLPEVERHTLLVLRAWPPSSTFSAQHQAKKFTFNLMAKNIMSMDPGEEETERLRREYITFMKGVVSAPLNLPGTPYWKALKSRAAILGVIERKMEERVEKLSKEDASVEQDDLLGWALKQSNLSKEQILDLLLSLLFAGHETSSMALALAIFFLEGCPKAVQELREEHLGIARRQRLRGECKLSWEDYKEMVFTQCVINETLRLGNVVRFLHRKVIKDVHYKGFDIPSGWKILPVLAPCIWTRPCTRTPALQSLEMEGKENTGTSADVAVGQCLSIISEGDHSSGSSGGLAQSSSFMPYGGGTRLCAGSELAKLEMAVFLHHLVLNFRWELAEPDQAFVFPFVDFPKGLPIRVHRIAQDDEQE

SEQ ID NO: 626 - protein, 483 aa, Nicotiana tabacum
  misc_feature: Public GI ID no.45260636
  misc_feature: Bit score of 1139.2 for HMM based on sequences of FIGURE 7.
  misc_feature (215)..(474): Pfam Name: p450 Pfam Description: Cytochrome P450
  misc_feature: Functional Homolog Of Ceres SEEDLINE ID no. ME06336 at SEQ ID NO. 441
MDFIIYLFLSFSISLITFLLLRAAAAAHFRRRKTRLPPGTLGLPFIGETLQLISAYKTENPEPFIDDRVSKYGNIFTTHIFGEPTVFSTDAETNRFILQNEGRPFESSYPSSLQNLLGKHSLLLMRGSLHKRMHSLTMSFANSSILKDHLLADIDRLVRLNLDSWTGRVFLMEEAKKITFNLTVKQLMSLDPCEWTEKLMKEYMLVIEGFFTIPLPFFSSTYRKAIQARRKVAEALGLVVKERRKERGGGERLKNDMLEALFEGDGVEGFSDEVIVDFMLALLVAGYETTSTIMTLAVKFLTETPHALSLLKEEHEEIRLRKGDVESLLWEDYKSMPFTQCVVNETLRVGNIISGVFRRTMTDINIKGYTIPKGWKVFACFRAVHLDHEHFKDARTFDPWRWQSNAGSTSSPNVFTPFGGGPRRCPGYELARVELSVFLHHLVTRHSWVPAEPDKLVFFPTTRMQKRYPIIVQRRSLFDPCKE

SEQ ID NO: 627 - protein, 472 aa, Arabidopsis thaliana
  misc_feature: Public GI ID no.15239203
  misc_feature: Bit score of 894.6 for HMM based on sequences of FIGURE 7.
  misc_feature (205)..(467): Pfam Name: p450 Pfam Description: Cytochrome P450
  misc_feature: Functional Homolog Of Ceres SEEDLINE ID no. ME06336 at SEQ ID NO. 441
MAFTAFLLLLSSIAAGFLLLLRRTRYRRMGLPPGSLGLPLIGETFQLIGAYKTENPEPFIDERVARYGSVFMTHLFGEPTIFSADPETNRFVLQNEGKLFECSYPASICNLLGKHSLLLMKGSLHKRMHSLTMSFANSSIIKDHLMLDIDRLVRFNLDSWSSRVLLMEEAKKITFELTVKQLMSFDPGEWSESLRKEYLLVIEGFFSLPLPLFSTTYRKAIQARRKVAEALTVVVMKRREEEEEGAERKKDMLAALLAADDGFSDEEIVDFLVALLVAGYETTSTIMTLAVKFLTETPLALAQLKEEHEKIRAMKSDSYSLEWSDYKSMPFTQCVVNETLRVANIIGGVFRRAMTDVEIKGYKIPKGWKVFSSFRAVHLDPNHFKDARTFNPWRWQSNSVTTGPSNVFTPFGGGPRLCPGYELARVALSVFLHRLVTGFSWVPAEQDKLVFFPTTRTQKRYPIFVKRRDFAT

SEQ ID NO: 628 - DNA, 1649 bp, Arabidopsis thaliana
  misc_feature: Ceres CLONE ID no.36334
  misc_feature: Encodes the peptide sequence at SEQ ID NO. 629
tccattaatactctctctccctcatcctctcttcttctctcatcatcatcttcttcttcaatggccttcaccgcttttctcctcctcctctcttccatcgccgccggcttcctcctcctactccgccgtacacgttaccgtcggatgggtcttcctccgggaagccttggtctccctctgataggagagacttttcagctgatcggagcttacaaaacagagaaccctgagcctttcatcgacgagagagtagcccggtacggttcggttttcatgacgcatctttttggtgaaccgacgattttctcagctgacccggaaacgaaccggtttgttcttcagaacgaagggaagctttttgagtgttcttatcctgcttccatttgtaaccttttggggaaacactctctgcttcttatgaaaggttctttgcataaacgtatgcactctctcaccatgagctttgctaattcttcaatcattaaagaccatctcatgcttgatattgaccggttagtccggtttaatcttgattcttggtcctctcgtgttctcctcatggaagaagccaaaaagataacgtttgagctaacggtgaagcagttgatgagctttgatccaggggaatggagtgagagtttaaggaaagagtatcttcttgtcatcgaaggcttcttctctcttcctctccctctcttctccaccacttaccgcaaagccatccaagcgcggaggaaggtggcggaggcgttgacggtggtggtgatgaaaaggagggaggaggaggaagaaggagcggagagaaagaaagatatgcttgcggcgttgcttgcggcggatgatggattttccgatgaagagattgttgacttcttggtggctttacttgtcgccggttatgaaacaacctccacgatcatgactctcgccgtcaaatttctcaccgagactcctttagctcttgctcaactcaaggaagagcatgaaaagattagggcaatgaagagtgattcgtatagtcttgaatggagtgattacaagtcaatgccattcacacaatgtgtggttaatgagacgctacgagtggctaacatcatcggcggtgttttcagacgtgcaatgacggatgttgagatcaaaggttataaaattccaaaagggtggaaagtattctcatcgtttagagcggttcatttagacccaaaccacttcaaagatgctcgcactttcaacccttggagatggcagagcaactcggtaacgacaggcccttctaatgtgttcacaccgtttggtggagggccaaggctatgtcccggttacgagctggctagggttgcactctctgttttccttcaccgcctagtgacaggcttcagttgggttcctgcagagcaagacaagctggttttctttccaactacaagaacgcagaaacggtacccgatcttcgtgaagcgccgtgattttgctacttgaagaagaagagacccatctgattttatttatagaacaacagtatttttcaggattaatttcttcttctttttttgcctccttgtgggtctagtgtttgacaataaaagttatcattactctataaagccttagcttctgtgtacataaaaaaaaaaaaacttttgtttacc

SEQ ID NO: 629 - protein, 472 aa, Arabidopsis thaliana; identical to SEQ ID NO: 627
  misc_feature: Ceres CLONE ID no.36334
  misc_feature: Bit score of 894.6 for HMM based on sequences of FIGURE 7.
  misc_feature (205)..(467): Pfam Name: p450 Pfam Description: Cytochrome P450
  misc_feature: Functional Homolog Of Ceres SEEDLINE ID no. ME06336 at SEQ ID NO. 441

SEQ ID NO: 630 - DNA, 1754 bp, Glycine max
  misc_feature: Ceres CLONE ID no.690176
  misc_feature: Encodes the peptide sequence at SEQ ID NO. 631
atatatacacacagtaccaaccactcttttttacttatggcatctttcatcttcacacctgtactctttcttcttatcatctccgccgtccttctcttcctccaccgccgatcccgctgccggcgcttccgcctaccgcctggtacactcgggctccccttcgtcggcgaaaccttacagctcatatcagcttacaagagtgacaacccggaacccttcatggaccagcgcgtgaaacggtacggtccaatcttcaccacccatgtgttcggcgaacccaccgtgttctcgaccgacccagaaacgaaccggttcattttgctcaacgaagggaagctcttcgaatgcagctaccccggttcgatatcgaacctccttgggaaacactctctgctcctcatgaaaggttctcttcacaagagaatgcactccctcactatgagcttcgccaactcctccatcatcaaggaccatttattggtcgacatagaccgcctcatccggctcaacttggattcctggtccgaccgggttcttctcatggaagaagccaagaagataacgtttgagttgacagtgaagcagctgatgagctttgatccaggtgaatggactgagacactaaggaaagagtacgtgcttgtgattgaaggatttttctcagttcccttgcctctcttctcaagtacctaccgtagagccatcaaggctaggacgaaggtggcagaggcattaacactggtagtgagggatagaagaaaagaaagcgtaacggaggagaaaaagaatgacatgctaggggcattgttggcctccggctaccacttttccgacgaggaaatagtcgattttatgttggctttgctcgtcgccggctatgaaaccacctctacaataatgactcttgccatcaagttcctcaccgagactcccttagcactggcacaactcaaggaagagcatgatcaaatcagagccaagaagagttgcccagaggcaccactggagtggacagattataagtcaatggcatttactcaatgtgttgtgaatgagactttaagggtggcaaacataattggtgcgatatttaggagagcaatgacagacatcaacataaaaggttacactattccaaagggatggagggtcgttgcttcatttcgtgcggtacatctaaaccctgaccatttcaaagatgcccgcaccttcaatccatggagatggcagagtaactcagaagcaagtagccctgggaatgtatataccccatttggaggagggccacgtctgtgtcctgggtatgagcttgccagagtggtgctctctgtcttccttcatcgcattgtcacccgttatagttggtttcctgcagaagaagataagttggtgttttttccaacgactaggacgcagaagaggtatcctatcatagtgaagcgtagagaggagtccaaactaagtaaatcgccatgagagacaccacacaaagaagaggaagaagagattgtagatgattttaatcattgtaatgtctaatgtattaagcaataatgaagtttcatccmctagtttagccgtttatattttatttattttagggggttataggaaggaatgtyttattagtagaccttaggaagggatgggaaatgaggatgtgaaagatcaaacccctcatcaccctaataaaacagttgagctaaatccacctgtgkatatgatyttaattaattcctacaaatcctttcacg

SEQ ID NO: 631 - protein, 479 aa, Glycine max
  misc_feature: Ceres CLONE ID no.690176
  misc_feature: Bit score of 894.7 for HMM based on sequences of FIGURE 7.
  misc_feature (207)..(469): Pfam Name: p450 Pfam Description: Cytochrome P450
  misc_feature: Functional Homolog Of Ceres SEEDLINE ID no. ME06336 at SEQ ID NO. 441
MASFIFTPVLFLLIISAVLLFLHRRSRCRRFRLPPGTLGLPFVGETLQLISAYKSDNPEPFMDQRVKRYGPIFTTHVFGEPTVFSTDPETNRFILLNEGKLFECSYPGSISNLLGKHSLLLMKGSLHKRMHSLTMSFANSSIIKDHLLVDIDRLIRLNLDSWSDRVLLMEEAKKITFELTVKQLMSFDPGEWTETLRKEYVLVIEGFFSVPLPLFSSTYRRAIKARTKVAEALTLVVRDRRKESVTEEKKNDMLGALLASGYHFSDEEIVDFMLALLVAGYETTSTIMTLAIKFLTETPLALAQLKEEHDQIRAKKSCPEAPLEWTDYKSMAFTQCVVNETLRVANIIGAIFRRAMTDINIKGYTIPKGWRVVASFRAVHLNPDHFKDARTFNPWRWQSNSEASSPGNVYTPFGGGPRLCPGYELARVVLSVFLHRIVTRYSWFPAEEDKLVFFPTTRTQKRYPIIVKRREESKLSKSP

SEQ ID NO: 632 - DNA, 1663 bp, Glycine max
  misc_feature: Ceres CLONE ID no.718939
  misc_feature: Encodes the peptide sequence at SEQ ID NO. 633
aaacttcttttatttccttcttcttctcttctctgttacagcaatggcttctttgccaacacttctctcgttcgccgtcatcttcttcaccgtcgccctcttatacctccgccgcgtgttccgccgccgtcagttccgcctcccgccggggagccacggcctgccgttgatcggcgagacgctgcagctgatatcggcgtacaagagcgacaatccggagcctttcatcgacgagcgcgtggagcggtacggttcgatcttcacgacgcacgtgttcggcgagccgacggtgttctcggcggacccggaggtgaaccggttcattctgcagaacgaagggaagctgttggattgcagttatcccggttcgatatcgaacctgctcggaaaacactctcttctgttgatgaaaggtgctctccacaagagaatgcactctctcacaatgagcttcgccaactcctccatcatcaaggatcatcttcttcaccacatcgaccgcctcatctgcctcaacctcgatgcctggtccgacactgtctttctcatggatcaggcaaaaaagataacatttgagttaacggtgaagcagttgatgagctttgacccagatgaatggactgagaatctaaggaaagagtatgttcttgtgattgaaggattcttcactctcccttttcctctcttctccaccacataccgcagagccatcaaggcaagaacaaaggtggcagaggcactagcgttggtagtgaggcagaggagaaaagagtatggtgaaaacaaagagaaaaagagtgacatgcttggggcactgttggcctccggcgaccacctttccgacgaggaaatagtggattttttgttggctttgctcgtcgccggttacgaaaccacctctaccataatgactcttgcgatcaagttcctcactgagactcctctggccttggcacagctcaaggaagagcatgaccaaatcagagcaaagagtcacccaggggcaccactggaatggacggattacaagtcaatggcatttactcaatgtgttgtgaatgagaccttgagagtggcaaacataattggtgggatatttaggagagcaacgacagacatcaacataaaaggttacactattcctaagggatggaaagtctttgcatcatttcgtgctgtacatctgaatcctgaacattacaaagatgcccggtccttcaatccctggagatggcagagtaactcatcagaaacagcaaatcctgggaatgtttatacaccatttggaggagggccaaggttgtgccctggctatgagctagccagagttgtactgtctgtcttccttcaccgcattgttacccgcttcagttgggttcctgctgaggaagataagttggtgttttttccaactactaggacgcagaagaggtatcctattattgtgcagcgtagacattagagaggaatgaccatgtatagcaatatgaaaattaagagcacaacagatagagaagggaaaaaaggaagctgagtgtagatcagtttaataagttaattttcatcacatgtaaataaataataaaattcatatctccccgttcatatatcaattgtctctgcaatgctcaacaaccagaaaagttggcaagaattttaacgc

SEQ ID NO: 633 - protein, 472 aa, Glycine max
  misc_feature: Ceres CLONE ID no.718939
  misc_feature: Bit score of 866.5 for HMM based on sequences of FIGURE 7.
  misc_feature (212)..(470): Pfam Name: p450 Pfam Description: Cytochrome P450
  misc_feature: Functional Homolog Of Ceres SEEDLINE ID no. ME06336 at SEQ ID NO. 441
MASLPTLLSFAVIFFTVALLYLRRVFRRRQFRLPPGSHGLPLIGETLQLISAYKSDNPEPFIDERVERYGSIFTTHVFGEPTVFSADPEVNRFILQNEGKLLDCSYPGSISNLLGKHSLLLMKGALHKRMHSLTMSFANSSIIKDHLLHHIDRLICLNLDAWSDTVFLMDQAKKITFELTVKQLMSFDPDEWTENLRKEYVLVIEGFFTLPFPLFSTTYRRAIKARTKVAEALALVVRQRRKEYGENKEKKSDMLGALLASGDHLSDEEIVDFLLALLVAGYETTSTIMTLAIKFLTETPLALAQLKEEHDQIRAKSHPGAPLEWTDYKSMAFTQCVVNETLRVANIIGGIFRRATTDINIKGYTIPKGWKVFASFRAVHLNPEHYKDARSFNPWRWQSNSSETANPGNVYTPFGGGPRLCPGYELARVVLSVFLHRIVTRFSWVPAEEDKLVFFPTTRTQKRYPIIVQRRH

SEQ ID NO: 634 - DNA, 1431 bp, Populus balsamifera subsp. trichocarpa
  misc_feature: Ceres ANNOT ID no.1464715
  misc_feature: Encodes the peptide sequence at SEQ ID NO. 635
atggcggttatttctctttatttggttttctttgtggttctcccggcgatagtccttatcgctcaccggagttcgcggtgccgacggctccggttgccgccggggagtttgggtctgccctttgttggggagactctacagttgatatctgcatacaagaccgagaaccctgaaccgtttatagatgagcgggtgagccggttcggttcgttgtttacgacccatgttttcggtgaacccactgttttttctgttgatccggaaacgaaccggttcatcatgcaaaatgaagggaagttgtttgagtgtagttacccgggttcgataagcaacttgctgggaaaacactccttgttgttgatgaagggcagtcttcacaaaagaatgcactctttgaccatgagttttgctaactcttcaatcattagagaccatcttctggttgatatagaccggttgatccgtctcaatttagattcctggtctgaccgggttcttctcatggaggaggccaagaagattacatttgagttgacaatgaagcagctaatgagctttgatccatgtgaatggaccgagagtctaagaaaagagtacgttcttgttattgaaggctttttcagtgtgccactacccatcttttcccccacttaccgcagagctatcaaagctaggactaaggtggcagaggctttgagcttggtagtgaagcaaaggaggatagagagtgagtcaggagagaaaaggaaggacatgctggcagctcttgtagcttcagatgatcatggcagcttctcggacgaggaaatagtggatttcttggtagctttgcttgtcgcaggctatgaaactacatctactagcatgactcttgctgtcaagttcctcactgagacacctctcgctttggctcagatcacggaggagcatgaacagattagagcaaagaagggtgagggggaagctcttgagtggagtgattacaagtcaatgaccttcactcaatgcgttgttaatgagacgctgagaatcgcgaacattataggtgggatatttagacgaacgatgacagatatcaatgtaaaaggctatacaattcctaaaggatggaaggtttttgcatcctttcgtggtgtgcatttagaccacgaatactttaaagatgctcggactttcaatccatggagatggcagaacaactcgggggcaacatgcccagcaaatgtgttcactccatttggaggagggcaacggctatgcccaggatatgagcttgctagagtagaactctctgttttccttcaccacctagtcacccgtttcagttggactccagctggagaagataagctggttttctttccaactacacggacacagaagcgatatcccatcaatgtgcagcgtcgagatcgtgtccaagccatgtaa

SEQ ID NO: 635 - protein, 476 aa, Populus balsamifera subsp. trichocarpa
  misc_feature: Ceres ANNOT ID no.1464715
  misc_feature: Bit score of 886.3 for HMM based on sequences of FIGURE 7.
  misc_feature (206)..(467): Pfam Name: p450 Pfam Description: Cytochrome P450
  misc_feature: Functional Homolog Of Ceres SEEDLINE ID no. ME06336 at SEQ ID NO. 441
MAVISLYLVFFVVLPAIVLIAHRSSRCRRLRLPPGSLGLPFVGETLQLISAYKTENPEPFIDERVSRFGSLFTTHVFGEPTVFSVDPETNRFIMQNEGKLFECSYPGSISNLLGKHSLLLMKGSLHKRMHSLTMSFANSSIIRDHLLVDIDRLIRLNLDSWSDRVLLMEEAKKITFELTMKQLMSFDPCEWTESLRKEYVLVIEGFFSVPLPIFSPTYRRAIKARTKVAEALSLVVKQRRIESESGEKRKDMLAALVASDDHGSFSDEEIVDFLVALLVAGYETTSTSMTLAVKFLTETPLALAQITEEHEQIRAKKGEGEALEWSDYKSMTFTQCVVNETLRIANIIGGIFRRTMTDINVKGYTIPKGWKVFASFRGVHLDHEYFKDARTFNPWRWQNNSGATCPANVFTPFGGGQRLCPGYELARVELSVFLHHLVTRFSWTPAGEDKLVFFPTTRTQKRYPINVQRRDRVQAM

SEQ ID NO: 636 - DNA, 1606 bp, Glycine max
  misc_feature: Ceres CLONE ID no.574698
  misc_feature: Encodes the peptide sequence at SEQ ID NO. 637
atttaacttcttctcttctcttccctgttacagcaatggcttctttgccagctttgccaacactcctcctctcgttcgccgccatcttcttcaccgtcctcctcctcttcctccgccgccggcagctccgcctcccgccggggagctacggcttgccgttgatcggcgagacgctgcaactgatatcggcgtacaagagcgacaatccagagccgttcatcgacgagcgcgtggagcggtacgggtcgatcttcacgacgcacgtgttcggagaggcgacggtgttctcggcggatccggaggtgaaccggttcattctgcagaacgaagggaggctgttggattgcagctaccccggttcgatatcgaacctgctcggaaaacactctcttctgttgatgaaaggtggtctccacaagagaatgcactctctgacgatgagcttggccaattcctccatcatcaaggatcatcttcttcaccacatcgaccgcctcgtctgcctcaacttggacgcctggtccaaccgcgtctttcttatggaccaggcaaaaaagataacatttgagctaacggtgaagcagttgatgagctttgacccagatgaatggactgagaatctaagaaaagagtatgttcttgtgattgaaggattcttcactctcccttttcctctcttctccaccacataccgcagagccatcaaggcaagaacaaaggtggcagaggcactaacgttggtagtaaggcagaggagaaaagagtatgatgaagacaaagagaaaaagaatgacatgcttggggcactgttggcctccggcgaccacttttccgacgaggaaatagtggattttttgttggctttgctcgtcgccggttatgagaccacctctaccataatgactcttgcgatcaagttcctcactgagactcccctggccttggcacagctcaaggaagagcatgaccaaatcagagcaagaagtgacccagggacaccactggaatggaccgattacaagtcaatggcgtttactcaatgtgttgtgaatgagaccttgagagtggcaaacataattggtgggatttttaggagagcaaggacagacattgacataaaaggttacactattcctaagggatggaaagtctttgcatcatttcgtgctgtacatctgaatcctgaacattacaaagatgcccggtccttcaatccctggagatggcagagtaactcatcagaagcaacaaaccctggtaatgtttatacaccatttggaggagggccacggttgtgccctggctataagctagccagagttgtactttccgtcttccttcaccgcattgttacccgcttcagttgggttcctgctgaggaagataagttggtgtttttcccaactactaggacgcagaagaggtatccaattattgtgcagcgtagagactagagaggagtgcagaccatgtatagcaatatgaaaattaagagcccaacagatagagaagggccaaaaggaagatgagtgtagatcagtttaataagttaatgttcatcatatgtaaataaatgataaaattcatatctcccagttcatatatc

SEQ ID NO: 637 - protein, 472 aa, Glycine max
  misc_feature: Ceres CLONE ID no.574698
  misc_feature: Bit score of 858.6 for HMM based on sequences of FIGURE 7.
  misc_feature (212)..(470): Pfam Name: p450 Pfam Description: Cytochrome P450
  misc_feature: Functional Homolog Of Ceres SEEDLINE ID no. ME06336 at SEQ ID NO. 441
MASLPALPTLLLSFAAIFFTVLLLFLRRRQLRLPPGSYGLPLIGETLQLISAYKSDNPEPFIDERVERYGSIFTTHVFGEATVFSADPEVNRFILQNEGRLLDCSYPGSISNLLGKHSLLLMKGGLHKRMHSLTMSLANSSIIKDHLLHHIDRLVCLNLDAWSNRVFLMDQAKKITFELTVKQLMSFDPDEWTENLRKEYVLVIEGFFTLPFPLFSTTYRRAIKARTKVAEALTLVVRQRRKEYDEDKEKKNDMLGALLASGDHFSDEEIVDFLLALLVAGYETTSTIMTLAIKFLTETPLALAQLKEEHDQIRARSDPGTPLEWTDYKSMAFTQCVVNETLRVANIIGGIFRRARTDIDIKGYTIPKGWKVFASFRAVHLNPEHYKDARSFNPWRWQSNSSEATNPGNVYTPFGGGPRLCPGYKLARVVLSVFLHRIVTRFSWVPAEEDKLVFFPTTRTQKRYPIIVQRRD

SEQ ID NO: 638 - DNA, 1419 bp, Populus balsamifera subsp. trichocarpa
  misc_feature: Ceres ANNOT ID no.1511511
  misc_feature: Encodes the peptide sequence at SEQ ID NO. 639
atggcggtttctgtttgtcttgttctctttattgttctcccagcgatagtctttatcgttcacaggagttcccggttccggaggctccggctgccgccggggagtttgggtctgccctttgttggagagactctacagctgatatctgcatacaagactgagaaccctgaaccgtttatagatgagcgggtgaaccggttcggttcgttgtttaaaacccatatttttggtgaaccgaccgttttttctgttgacccggaaacgaacaggttcattttgcaaaatgaagggaagctgtttgagtgtagttaccccggttcgataagcaacctgctgggaaaacattctttgttgctaatgacgggtaatcttcacaaaaaaatgcattccttaaccatgagtttcgctaactcttcaatcatcagagaccatctcttggtcgatatagaccggttgatccgtctcaatttagattcttggtccgaccgggttcttctcatggaggaggccaagaagactacatttgagttgacaatgaagcagctaatgagctttgatccatgtgaatggaccgagagtctgagaagagagtacgtgcttgttattgaaggctttttcagcgtgcctctacccatcctttcccccacataccgcagagctatcaaagctaggactaaggtggcagaggctttgagtttggtagtgaagcaaaggaggatagagagtgagtcaggagagaaaaagaaagacatgcttggagctcttttagcttcagatgatcatggaggcttctcggacgaggagatagtagatttcttggtggctctgcttgttgcaggctatgaaactacatctacaagcatgactcttgctgttaagttcctcaccgagacacctctggctctggctcagatcaaggaggagcatgaacagattagaggaaagaagggcgaggagggagctcttgagtggagtgattacaagtcaatgaccttcactcagtgtgttgttaatgagactttgagaatagcaaacataataggtgggatatttagacgaacaatgacagatataaatgttaaaggttatacaattcctaaaggatggaaggtttttgcatcctttcgtggtgtacatttagaccatgaatacttcaaagatgctcgaactttcaatccgtggagatggcaggacgactcgggggcaacatgcccagcaaatgtgttcactccttttggaggagggcaacggttatgcccaggatatgaacttgctagagtagaactctctgttttccttcaccacctggtcacccgtttcagttggaccccagctgaacaagacaagctggttttctttccaactacgcggacacaaaagcgatatcccatcaatgtgcagcgtcgaaatcgtgtctaa

SEQ ID NO: 639 - protein, 472 aa, Populus balsamifera subsp. trichocarpa
  misc_feature: Ceres ANNOT ID no.1511511
  misc_feature: Bit score of 879.3 for HMM based on sequences of FIGURE 7.
  misc_feature (205)..(466): Pfam Name: p450 Pfam Description: Cytochrome P450
  misc_feature: Functional Homolog Of Ceres SEEDLINE ID no. ME06336 at SEQ ID NO. 441
MAVSVCLVLFIVLPAIVFIVHRSSRFRRLRLPPGSLGLPFVGETLQLISAYKTENPEPFIDERVNRFGSLFKTHIFGEPTVFSVDPETNRFILQNEGKLFECSYPGSISNLLGKHSLLLMTGNLHKKMHSLTMSFANSSIIRDHLLVDIDRLIRLNLDSWSDRVLLMEEAKKTTFELTMKQLMSFDPCEWTESLRREYVLVIEGFFSVPLPILSPTYRRAIKARTKVAEALSLVVKQRRIESESGEKKKDMLGALLASDDHGGFSDEEIVDFLVALLVAGYETTSTSMTLAVKFLTETPLALAQIKEEHEQIRGKKGEEGALEWSDYKSMTFTQCVVNETLRIANIIGGIFRRTMTDINVKGYTIPKGWKVFASFRGVHLDHEYFKDARTFNPWRWQDDSGATCPANVFTPFGGGQRLCPGYELARVELSVFLHHLVTRFSWTPAEQDKLVFFPTTRTQKRYPINVQRRNRV

SEQ ID NO: 640 - protein, 473 aa, Citrus sinensis
  misc_feature: Public GI ID no.70609692
  misc_feature: Bit score of 898.5 for HMM based on sequences of FIGURE 7.
  misc_feature (213)..(469): Pfam Name: p450 Pfam Description: Cytochrome P450
  misc_feature: Functional Homolog Of Ceres SEEDLINE ID no. ME06336 at SEQ ID NO. 441
MAGLTLVYDLVLYISISTVIFFIIKRSRSRRLRLPPGSLGLPFLGETLQLIAAYKTENPEPFIDVRVKRFGSIFTTHIFGEPTVFSADPETNRFILQNEGKSFECSYPGSVSNLLGKHSLLLMKGSLHKRMHSLTMTFANSSIIRDHLLVVIDRLVRLHMDSWTDRVLLMEEAKKITFELTVKQLMSFDPNEWTESLRKEYVLVIEGFFTVPLPIFSTTYRRAIQARTKVAEALSLVVRQRRKESEPGERKNDMLEALLAGDDGFSDEEIVDFLVALLVAGYETTSTIMTLAVKFLTETPLALAQLKEEHDEIRAKKSKQEPLEWNDYKSMPFTQCVVNETLRVANIISGVFRRAMTDINIKGYTIPKGWRVFASFRAVHLDHDHFKDARSFNPWRWQNNSGATSPVNVSTSFGGGPRLCPGYELARVELSVFLHHLVTRFSWVPAEQDKLVFFPTTRTQKRNPIIVQRRNEN

SEQ ID NO: 641 - protein, 474 aa, Vigna radiata
  misc_feature: Public GI ID no.9587211
  misc_feature: Bit score of 857.5 for HMM based on sequences of FIGURE 7.
  misc_feature (210)..(468): Pfam Name: p450 Pfam Description: Cytochrome P450
  misc_feature: Functional Homolog Of Ceres SEEDLINE ID no. ME06336 at SEQ ID NO. 441
MVSLPTLLLLFAASAAAIFLHRAFSRRKFRLPPGSYGLPFIGETLQLISAYKSSNPEPFMDERVRRYGSIFMTHVFGEPTVFSADPELNRFILQNEGKLLDCSYPGSISNLLGKHSLLLMKGALHKRMHSLTMSFANSSIIKDHLLHHIDRLIGLNLDTWSDRVTLMDQAKKITFELTVKQLMSFDPDEWTESLRKEYVLVIEGFFTLPLPLFSTTYRRAIKARTKVAEALTLVVRQRREEYNQGKEKKSDMLGALLASGDHFSDDQIVDFLLALLVAGYETTSTIMTLAVKFLTETPLALAQLKEEHDQIRARSDPGAPLEWTDYKSMVFTQHVVNETLRVANIIGGIFRRATTDIDIKGYTIPKGWKVFASFRAVHLNPEYYKDARTFNPWRWQSNSSEAANPANVYTPFGGGPRLCPGYELARVVLSVFLHRIVTRFSWVPAEEDKLVFFPTTRTQKRYPIIVKRRNANHV

SEQ ID NO: 642 - protein, 503 aa, Oryza sativa subsp. indica
  misc_feature: Public GI ID no.125551173
  misc_feature: Bit score of 765.8 for HMM based on sequences of FIGURE 7.
  misc_feature (348)..(501): Pfam Name: p450 Pfam Description: Cytochrome P450
  misc_feature: Functional Homolog Of Ceres SEEDLINE ID no. ME06336 at SEQ ID NO. 441
MQPLAAGGAVSWPLYAATVAAALLVTAIVLRLAARSTAAACKARPPAGSLGWPLVGETLQFISAAYSSRPESFVEKRCRRYGKVFRSHLWGSPAVVSADAEASRAVLQSDASAFVPWYPRSLMELMGESSILVLGGALQRRVHGLAGAFFKSPELKARVTADMRSRLAAAMDAWRATAATGAGAAVRVQDEAKSIVFEILVRALIGLEQGQEMNYLRQQFHIFIAGLISLPIKLPGTQLYRSLKAKKRMTSLIQNIIQEKRRRIFEGKDLCAVSRDLIDVLMSNGSDELSLTDELISDNMIDFMIPAEDSVPVLITLAIKYLSECPLALQQLEEENMELKRQKSDVGETLEWTDYMSLTFTQHVITETLRIGNIISGIMRKAVRDVEVKGQGDVVIPKGWCVLVYFRSVHLDANIYDDPYAFNPWRWKERDMAAATTNSGSGFTPFGGGQRLCPGLDLARLQTSIFLHHLVTNFTWVAQGDVVVNFPTVRLKRGMPIKVTPKT

SEQ ID NO: 643 - protein, 503 aa, Oryza sativa subsp. japonica
  misc_feature: Public GI ID no.48475241
  misc_feature: Bit score of 766.2 for HMM based on sequences of FIGURE 7.
  misc_feature (348)..(501): Pfam Name: p450 Pfam Description: Cytochrome P450
  misc_feature: Functional Homolog Of Ceres SEEDLINE ID no. ME06336 at SEQ ID NO. 441
MQPLAAGGGVSWPLYAATVAAALLVTAIVLRLAARSTAAACKARPPAGSLGWPLVGETLQFISAAYSSRPESFVEKRCRRYGKVFRSHLWGSPAVVSADAEASRAVLQSDASAFVPWYPRSLMELMGESSILVLGGALQRRVHGLAGAFFKSPELKARVTADMRSRLAAAMDAWRATAATGAGAAVRVQDEAKLIVFEILVRALIGLEQGQEMNYLRQQFHIFIAGLISLPIKLPGTQLYRSLKAKKRMTSLIQNIIQEKRRRIFEGKDLCAVSRDLIDVLMSNGSDELSLTDELISDNMIDFMIPAEDSVPVLITLAIKYLSECPLALQQLEEENMELKRQKSDVGETLEWTDYMSLTFTQHVITETLRIGNIISGIMRKAVRDVEVKGQGDVVIPKGWCVLVYFRSVHLDANIYDDPYAFNPWRWKERDMAAATANSGSGFTPFGGGQRLCPGLDLARLQTSIFLHHLVTNFTWVAQGDVVVNFPTVRLKRGMPIKVTPKT

SEQ ID NO: 644 - protein, 473 aa, Artemisia annua
  misc_feature: Public GI ID no.86279652
  misc_feature: Bit score of 823.4 for HMM based on sequences of FIGURE 7.
  misc_feature (213)..(466): Pfam Name: p450 Pfam Description: Cytochrome P450
  misc_feature: Functional Homolog Of Ceres SEEDLINE ID no. ME06336 at SEQ ID NO. 441
  misc_feature (68)..(68): Xaa is any aa, unknown, or other
MELYTTSLLFIVSFSTIIFLLFRRNSAFWRSINTPPGSTGLPLIGETFQIISAYKTENPEPFIDARVXKYGSVFTTHVFGERTVFSADVEINKFILQNEGRLFESSYPGSIANLVGKHSLLLMRGGLHRRMHSLTMSFANSTIIKDHLLADIDRLVRLNLDSWTGRILLMDEAKKITFELTLKQLLSIEPCEWSENLRKEYMLVIEGFFCIPLPFFSLTYRRAIQARKRVTEALHLVVRERRIEREKGVKKNDMLAALFDSDGDEENFYDDEIVDFLVSLLVAGYDTTSTTMTLAVKYLTDTPSALAQLKEEHDAIRAKKGASVALEWDDYKSMPFTQCVVNETLRLSNIISGVFRRAITDVKIKDYTIPKGAKVFTSLRAVHLDQDNFEDARVFNPWRWQKTSDSASFMPFGGGPRRCPGHELARVALSVFLHHLITHFSWKPAEEDKVVFFPTTRTQKRYPIIVEQRNVVG

SEQ ID NO: 645 - DNA, 1976 bp, Triticum aestivum
  misc_feature: Ceres CLONE ID no.568563
  misc_feature: Encodes the peptide sequence at SEQ ID NO. 646
ctctcgtagtcgcgtatctccacctccactacaccacaccatcagaagcccggccggcacggtcggtgcaaggatagctgcagacacacgcccacacagacacggtgtgacagcaattgccaccggcgatgtccgtttcttggccggcgccgtcgacgtgcgcggccgccggggccctgctggccgccgcatggctgctgtgcttcaggctgctcccggccgcggccaggccgagaaggcgggcgatgaagacagaggcgcagctccctcccggcagcttcgggtggccggtcgtcggcgagacgctggacttcgtctcctgcgcctactccccgcgccccgaggcgttcgtggacaagcgccgcctccggtacggcggcgcggtgttccggtcgcacctgttcgggtcggcgacggtggtgacggcggacgcggaggtgaaccggttcgtgctgcagagcgacgcgcggtcgttcgtgccgtggtacccgcggtcgctgacggagctcatgggcaagtcctccatcctgctcatcaacggcagcctgcagcgccgcgtccacggcctcgtcggcgccttcttcaagtcgccgcagctcaaggcgcaggtcaccgccgacatgcagcgccgcctcgcccccgcgctcgcctcctggcgccaccagggccccggcgcccgcctccgcatccaggaccacgccaagacgatagtgttcccgatcctggtgcggggtctgatcgggctggaggcaggcccagagatgcagcagctcaagcagcaattccaggaatttattgtcggactcatgtcccttcccattaagctgccagggactaggctctacagatccctccaggccaagaagaggatggccagggtgatacagaggatcatacaggagaagaggaggaggagggccctcgacggcggcggcgggccgagggacgccatcgacgtgctcatgggcgacggcagcgaggagctcaccgacgagctcatatccgacaacatgatcgacttcatgatccccgccgaggactccgtgccagtgctcatcacgctcgccgtcaagttcctcagcgagtgccccctcgccctgcagcagctcgaggaggagaacatggagctcaagatgaggaaaaccgacctgggtgaaaccttgcaatggactgactacatgtccttgtcattcacgcagcatgtgataacggagacgctgcggatcgggaacatcatcagcgggatcatgcgcaaggcggtccgcgacgtcgaggtgaaggggcatctcatccccaaaggatggcgcgtgttcatgtacttccggtcggtccacctcgacgacatgctctacgaggatccctgcaagttcaatccatggaggtggaaggagaaggacatgagcactagcagcttcaccccttttggcggtgggcagaggctgtgcccgggcctggatctggccaggctggaagcttccatctttctccaccacttggtcaccagcttcaggtgggtggccgaggaggaccacatcgtcaacttccccaccgtgcgcctcaagggaggcatgcccatcagggtcaccgccaaagactagctgcctgtcaatcagacggtcgtccttgatcaactccccgcagcagccaagccagccatgcatatacatgatgctgctgctgcaagtatggtatcttccatagcaaggttgaaaggatccttaaaacaagctagctaggcaacatctgatctgagagtacatagttatgggcatgcatgtataagtgttgtagggaagggttaattagccatggagtaggtgccactcatcaccgtggctcgttaatcatagccgaggaagaagactctgaccgatgatgcatgctgttatactagtataagtagtatagtgcttatgtcacaaggaatagatatctcatccctgtacatggaagaactttgccatctggtctgctcc

SEQ ID NO: 646 - protein, 489 aa, Triticum aestivum
  misc_feature: Ceres CLONE ID no.568563
  misc_feature: Bit score of 915.0 for HMM based on sequences of FIGURE 7.
  misc_feature (343)..(462): Pfam Name: p450 Pfam Description: Cytochrome P450
  misc_feature: Functional Homolog Of Ceres SEEDLINE ID no. ME06336 at SEQ ID NO. 441
MSVSWPAPSTCAAAGALLAAAWLLCFRLLPAAARPRRRAMKTEAQLPPGSFGWPVVGETLDFVSCAYSPRPEAFVDKRRLRYGGAVFRSHLFGSATVVTADAEVNRFVLQSDARSFVPWYPRSLTELMGKSSILLINGSLQRRVHGLVGAFFKSPQLKAQVTADMQRRLAPALASWRHQGPGARLRIQDHAKTIVFPILVRGLIGLEAGPEMQQLKQQFQEFIVGLMSLPIKLPGTRLYRSLQAKKRMARVIQRIIQEKRRRRALDGGGGPRDAIDVLMGDGSEELTDELISDNMIDFMIPAEDSVPVLITLAVKFLSECPLALQQLEEENMELKMRKTDLGETLQWTDYMSLSFTQHVITETLRIGNIISGIMRKAVRDVEVKGHLIPKGWRVFMYFRSVHLDDMLYEDPCKFNPWRWKEKDMSTSSFTPFGGGQRLCPGLDLARLEASIFLHHLVTSFRWVAEEDHIVNFPTVRLKGGMPIRVTAKD

SEQ ID NO: 647 - DNA, 1952 bp, Zea mays
  misc_feature: Ceres CLONE ID no.1697472
  misc_feature: Encodes the peptide sequence at SEQ ID NO. 648
aatagccggccggacgccactctatcccggccgtcggccgcggttcaggctctccttccattagaagcactcttctagtttagactttataatagaggcgctgaggcctcacccttttccctggtgttgcaagttgcaacacacagcgtccggcgagatcggcgatcagaaaccacgagcccacccaccatccggaacgcgcgcgcgatgtgtcccgtcagaggcggtggttgttcttggccagcgtccgtcgtcggctctgtcacggcggcgctgctcctcgccgccgtcatcgtgcggctcttcgtcccccgtgcctgttcttcaggaattatcaaggggcggcggcaggtaggtgctggtgctgccggaggagcacggctccctgccggctcgctcgggtggccgctcctcggcgagacgctggcgttcatccgggccgcgtactcccctcgcccggagtccttcgtcgagaaacgccgcgtcttgtacgggaaggtgttcaagtcgcacctgtgggggtcgccggcggtggtgagctcggacccggaggtgagccgcgcggtgctgcaggccgacgcgtcggcgttcgttccatggtacccgcgatcgctcatggagctgatggggcaatcgtccatcctagtgctcggcggcggcctccagcgccgggtgcacggcctcgcgggcgccttcttcaagtcgccgcagctcaaggcgcaggtcaccctggacatgcagcgccgcgtcggccgcgccatggacatgtggggcaggcggcgccatcggagcatgggcgacgacgacagcggtggtatgcccgtgcgtgtgcagaacgaggccaagtcgattgtgttcgaaatcctagtgagggcgctgatagggttagaggaaggggacaagatgcagtacctcaggcaacagtttcaagaattcattgctggtttgatatcacttcctgttaagcttccggggactcaactctatagatccctcaaggctaagaagaggatgacaaagttgataaaaacgatcatccaagagaagaggaagaagatgatgtcggaaggaggcgacgatctgcgtggtgggactcatccacgtgatatgatcgacgtcctgctaggcaacggcaacgacgagctcaccgacgagctgatatctgacaacatgatcgacttcatgatccctgcagaggactccgtgccggtgctcatcacgctggccgtcaagtacatcagcgaatgcccactggctctgcagcaactcgaggaggagaacatggagctcaagaggcagaaatcaggcgcgggagaaaccctagaatggacagactacatgtcgctcgccttcacacagcacgtgatcacggagacgctgcggatgggcaacatcatcaacgggatcatgcggaaggcggtgcgagacgtggaggtgagaggccacctggtccccaagggctggcgcgtcctcgtctacttccgcgccgtccacctcgacgccgccgtccacgacgacccgcacgccttcaacccctggaggtggaaggagaggcccgacgtcgtggccatgagcggcttcaccccgttcggcggcggccagaggctgtgccctgggctcgacctggcaaggctcgaggcctccatctttctgcaccatctcgtcaccaatttcaggtgggtggcggaggaggacaccgtcgtcaacttccccacggtgcggctcaagcgagggatgccaatcgcagtgacgcccagaacctgctgaacgcaacgcaacttgccaggcaaaaccatactatacatttatactccgtaatcaactaaagaggtgtgagaaataatacagtaaatgcatgcatgtaatggagggcgaaattaaaagttggcacggcaaagaagctgctggtatgccaaaagttcagtttgcaaattatatagtttaattactat

SEQ ID NO: 648 - protein, 519 aa, Zea mays
  misc_feature: Ceres CLONE ID no.1697472
  misc_feature: Bit score of 765.2 for HMM based on sequences of FIGURE 7.
  misc_feature (367)..(491): Pfam Name: p450 Pfam Description: Cytochrome P450
  misc_feature: Functional Homolog Of Ceres SEEDLINE ID no. ME06336 at SEQ ID NO. 441
MCPVRGGGCSWPASVVGSVTAALLLAAVIVRLFVPRACSSGIIKGRRQVGAGAAGGARLPAGSLGWPLLGETLAFIRAAYSPRPESFVEKRRVLYGKVFKSHLWGSPAVVSSDPEVSRAVLQADASAFVPWYPRSLMELMGQSSILVLGGGLQRRVHGLAGAFFKSPQLKAQVTLDMQRRVGRAMDMWGRRRHRSMGDDDSGGMPVRVQNEAKSIVFEILVRALIGLEEGDKMQYLRQQFQEFIAGLISLPVKLPGTQLYRSLKAKKRMTKLIKTIIQEKRKKMMSEGGDDLRGGTHPRDMIDVLLGNGNDELTDELISDNMIDFMIPAEDSVPVLITLAVKYISECPLALQQLEEENMELKRQKSGAGETLEWTDYMSLAFTQHVITETLRMGNIINGIMRKAVRDVEVRGHLVPKGWRVLVYFRAVHLDAAVHDDPHAFNPWRWKERPDVVAMSGFTPFGGGQRLCPGLDLARLEASIFLHHLVTNFRWVAEEDTVVNFPTVRLKRGMPIAVTPRTC

SEQ ID NO: 649 - DNA, 1981 bp, Triticum aestivum
  misc_feature: Ceres CLONE ID no.912067
  misc_feature: Encodes the peptide sequence at SEQ ID NO. 650
gtagtcgcgtgcctccacctccactacaccgcaccgcgccatcagaaggccggccgggtcggtcggtgcaaggatattgcacacacacgctcgcagacacggtgtgacagcaattgcctccggcgatgtccgtttcttggccggcgccgtcgacgtgcgcggccgccggggccctcctggccgccgcgtggctgctgtgcttcaggctgttcccggccgtggcgaggccgagaaggcgggcgatgaagacgggggcgcagctccctcccggcatcttcgggtggccggtcgtcggcgagacgctggacttcgtctcctgcgcctactccccacgccccgaggcgttcgttgacaagcgccgcctccggtacggcagcgcggtgttccggtcgcacctgttcgggtcggcgacggtagtgacggcggacgcggaggtgaaccggttcgtgctgcagagcgacgcgcggtcgttcgtaccgtggtacccgcggtcgctgacggagctcatgggcaagtcctccatcctcgtcatcaacggcagcctgcagcgccgcgtccacggcctcgtcggcgccttcttcaagtcgccgcagctcaaggcgcaggtcaccgccgacatgcagcgccgcctcgccccggcgctcgccgcctggcgcgagcagggccccggcgcgcgcctccgcatccaggaccacgccaagacgattgtgttccagatcctggtgcgggctctgatcgggctggaggcaggcccagagatgcagcagctcaagcagcaattccaggaatttattgtcggactcatgtcccttcccattaagctgccagggactaggctctacagatccctccaggccaagaagaggatggcgagggtcgtacagaggatcatacaggagaagaggaggaggagggccctggacggcggcggcgcgccgagagacgccatcgacgtgctcatgggcgacggcagtgaggagctcaccgacgagctcatatccgacaacatgatcgacttcatgatccccgccgaggactccgtgccggtgctcatcacgctcgccgtcaagttcctcagcgagtgccccctcgccttgcaacagcttgaggaggagaacatgcagctcaagatgagaaaaaccgacctgggtgaaaccttgcaatggactgactacatgtccttgtcattcacgcagcatgtgataacggagacgctgcggattgggaatatcatcagtgggatcatgcgcaaggcggtccgcgacgtcgaagtgaaggggcatctcatccccaaaggatggcgtgtgttcatgtacttccggtcggtccacctcgacgacatgctctacgaggatccctgcaagttcaatccatggaggtggaagtgtgtcaatcaacaggagaaggacatgagcactagcagcttcaccccttttggtggtgggcagaggctgtgcccgggcctggatctggccaggctggaagcttccatctttctccaccacttggtcaccagcttcaggtgggtggccgaggaggaccacatcgtcaacttccccaccgtgcgcctcaagggaggcatgcccatcagggtcaccgccaaagactagctacccgttactcggaccatcgtccttgatcaactccccgcagcagccaagccagccaaaggctcaagttacatgtgcatatacataatgctactgctacaagtatgtggtgttatccatagcaaggttaaaagccccttcaaggagtaagctagctaggcaacatctgatgtgagtacataggggggtatgttgaagtgttgtaggggagcttaattagccaaggagtagtaggtgccactgatgatcactgtggctcgttaatcatagccgagggagactctgaccgatgatgcatgctgttatagtagtataagtagtagtatagtgctggtgtcacaaggaatagatatatcatctatgtatacatg

SEQ ID NO: 650 - protein, 494 aa, Triticum aestivum
  misc_feature: Ceres CLONE ID no.912067
  misc_feature: Bit score of 902.8 for HMM based on sequences of FIGURE 7.
  misc_feature (343)..(467): Pfam Name: p450 Pfam Description: Cytochrome P450
  misc_feature: Functional Homolog Of Ceres SEEDLINE ID no. ME06336 at SEQ ID NO. 441
MSVSWPAPSTCAAAGALLAAAWLLCFRLFPAVARPRRRAMKTGAQLPPGIFGWPVVGETLDFVSCAYSPRPEAFVDKRRLRYGSAVFRSHLFGSATVVTADAEVNRFVLQSDARSFVPWYPRSLTELMGKSSILVINGSLQRRVHGLVGAFFKSPQLKAQVTADMQRRLAPALAAWREQGPGARLRIQDHAKTIVFQILVRALIGLEAGPEMQQLKQQFQEFIVGLMSLPIKLPGTRLYRSLQAKKRMARVVQRIIQEKRRRRALDGGGAPRDAIDVLMGDGSEELTDELISDNMIDFMIPAEDSVPVLITLAVKFLSECPLALQQLEEENMQLKMRKTDLGETLQWTDYMSLSFTQHVITETLRIGNIISGIMRKAVRDVEVKGHLIPKGWRVFMYFRSVHLDDMLYEDPCKFNPWRWKCVNQQEKDMSTSSFTPFGGGQRLCPGLDLARLEASIFLHHLVTSFRWVAEEDHIVNFPTVRLKGGMPIRVTAKD

SEQ ID NO: 651 - protein, 481 aa, Pinus taeda
  misc_feature: Public GI ID no.59800264
  misc_feature: Bit score of 535.5 for HMM based on sequences of FIGURE 7.
  misc_feature (229)..(454): Pfam Name: p450 Pfam Description: Cytochrome P450
  misc_feature: Functional Homolog Of Ceres SEEDLINE ID no. ME06336 at SEQ ID NO. 441
MADQISLLLVVFTAAVALLHLIYRWWNAQRGQKRTSNEKNQELHLPPGSTGWPLIGETYSYYRSMTSNRPRQFIDDREKRYDSDVFVSHLFGSQAVISSDPQFNKYVLQNEGRFFQAHYPKALKALIGDYGLLSVHGDLQRKLHGIAVNLLRFERLKFDFMEEIQNLVHSTLDRWVDKKEIALQNECHQMVLNLMAKQLLDLSPSKETNEICELFVDYTNAVIAIPIKIPGSTYAKGLKARELLIRKISNMIKERRDHPHIVHKDLLTKLLEEDSISDEIICDFILFLLFAGHETSSRAMTFAIKFLTTCPKALTQMKEEHDAILKAKGGHKKLEWDDYKSMKFTQCVINETLRLGNFGPGVFRETKEDTKVKDCLIPKGWVVFAFLTATHLDEKFHNEALTFNPWRWELDQDVSNNHLFSPFGGGARLCPGSHLARLELALFLHIFITRFRWEALADEHPSYFPLPYLAKGFPMRLYNRE

SEQ ID NO: 652 - DNA, 1847 bp, Panicum virgatum
  misc_feature: Ceres CLONE ID no.1806872
  misc_feature: Encodes the peptide sequence at SEQ ID NO. 653
caccacaacctgatactcctctcgcaacaaatccgcggcgccgatcagcgatcggagctgaagcaccatcatccggcgcgcgtgatgtggcccggggacggtccttggccggcgtccgccgtcacggcggcggcgctgctcgtcgccgctgtcatcatcgtgcggcggctcttcatccctcgcctgtggccgtcgtcagggtcagggaccgagcgacggggggcggcgagcggcggcgcgtccggatcggcgcgtctccccgcgggctcgctcgggtggccgctcctcggcgagacgccggcgttcatcctcgcggcgtactccgcccgcccggagtccttcgtcgagcggcggcggctcctgtacgggaaggtgttcgcgtcgcacctgtggggctccccggcggtggtgagctcggacccggaggtgagccgcgcggtgctgcaggccgacgcgtcggcgttcgtaccgtggtacccgcgctcgctcatggagctcatggggcggtcctccatcctggtgctcggcggcgggctccagcgccgggtgcacggcctcgccggcgccttcttcaagtcgccgcacctcaaggcccgggtcaccgccgacatgcgccgccgcgtcgcccgcgccatggccgcgtggcagcgccgcggcgcgcccgtcgtgcgcgtccaggacgaggccaagtcgattgtgtttgaaatcctggtgagggcgctgatagggctagacgaaggacacgaaatgcagtacctcaggcaacagttcaaagaattcattgccggtctgatatcacttccggttaaacttcccgggactcagctctacagatccctcaaggctaagaagaggatgacaacgttgatccaaaagatcatccaggagaagaggaagagaaggatcgccgccgggtgcgatgaggatccgcatgatgggacgactcatcatccgcgcaacatgatcgacgtgctgctgggcaatggcagcgacgagctcaccgacgagctgatatccgacaacatgatcgacttcatgatccctgcggaggactcggtgccggtgctcatcacgctggccgtcaagtacctcagcgagtgcccaccggctctacagcagctggaggaggagaacatggagctgaagaggcggaaatcaggcgctggagaaaccctagaatggacagactacatgtcgctcaccttcacacagcacgtgatcacggagacgctgcggatggggaacatcatcaacgggatcatgcgcaaggcggtgcgggacgtggaggtgagaggccacctcatccccaagggctggcgcgtcctcgtctacttccgcgccgtccacctcgacgccgccgtccacgacgacccgcacgccttcaacccatggaggtggaaggacagggccgacgtgatgaccggcggcggcggcgggggcttcacccccttcggcggcgggcagaggctctgcccggggctggacctcgccaggctcgaggcctccatcttcctgcaccatctcgtcaccaacttcaggtgggtggcggaggaggacgccgtcgtcaacttccccacggtgcggctccggcgagggatgccaatcgcagtcacgcccagaacgtgaacacaggttgccttccgcgcgcgtcgaccatctgtcaagtgtttgactagaatagtttccttcttcaaattaagcagaaaaatttaagaaaactcatactgtacatgcaaccgtgcatttgatgagtgcagacttgagatgcatggttttatacctgatgagttgtactcgaatcgttgtacgttacgcaactgaattaaatatatacagagaatttttac

SEQ ID NO: 653 - protein, 513 aa, Panicum virgatum
  misc_feature: Ceres CLONE ID no.1806872
  misc_feature: Bit score of 752.7 for HMM based on sequences of FIGURE 7.
  misc_feature (359)..(486): Pfam Name: p450 Pfam Description: Cytochrome P450
  misc_feature: Functional Homolog Of Ceres SEEDLINE ID no. ME06336 at SEQ ID NO. 441
MWPGDGPWPASAVTAAALLVAAVIIVRRLFIPRLWPSSGSGTERRGAASGGASGSARLPAGSLGWPLLGETPAFILAAYSARPESFVERRRLLYGKVFASHLWGSPAVVSSDPEVSRAVLQADASAFVPWYPRSLMELMGRSSILVLGGGLQRRVHGLAGAFFKSPHLKARVTADMRRRVARAMAAWQRRGAPVVRVQDEAKSIVFEILVRALIGLDEGHEMQYLRQQFKEFIAGLISLPVKLPGTQLYRSLKAKKRMTTLIQKIIQEKRKRRIAAGCDEDPHDGTTHHPRNMIDVLLGNGSDELTDELISDNMIDFMIPAEDSVPVLITLAVKYLSECPPALQQLEEENMELKRRKSGAGETLEWTDYMSLTFTQHVITETLRMGNIINGIMRKAVRDVEVRGHLIPKGWRVLVYFRAVHLDAAVHDDPHAFNPWRWKDRADVMTGGGGGGFTPFGGGQRLCPGLDLARLEASIFLHHLVTNFRWVAEEDAVVNFPTVRLRRGMPIAVTPRT

SEQ ID NO: 654 - protein, 501 aa, Oryza sativa subsp. japonica
  misc_feature: Public GI ID no.115487260
  misc_feature: Bit score of 701.4 for HMM based on sequences of FIGURE 7.
  misc_feature (209)..(493): Pfam Name: p450 Pfam Description: Cytochrome P450
  misc_feature: Functional Homolog Of Ceres SEEDLINE ID no. ME06336 at SEQ ID NO. 441
MAAAALLLLAAAAAAVVVAMALRWLLLLGGPAAGRLGKRARMPPGSTGLPLIGETLRLISAYKTPNPEPFIDERVARHGGVFTTHVFGERTVFSADPAFNRLLLAAEGRAVHSSYPSSIATLLGARSLLLTRGAAHKRLHSLTLTRLGRPASPPLLAHIDRLVLATMRQWEPAATVRLMDEAKKITFNLTVKQLVSIEPGPWTESLRREYVKLIDGFFSIPFPLAYFLPFTTYGQALKARKKVAGALREVIKKRMEEKAENGGSIGDDEGKKEKKDMVEELLQAEGGSFSEEEMVDFCLSLLVAGYETTSVLMTLAVKFLTETPAALAELKEEHANIRDMKGKNQPLEWSDYKSMPFTQCVINETLRVGNIISGVFRRANTDIHYKDYTIPKGCKIFASFRAVHLNNEHYENARTFNPWRWQINNKLQNAVGANIFTPFGGGPRLCPGYELARVVVSIFLHHLVTRFSWEETEEDRLVFFPTTRTLKGYPINLRLLSESIC

SEQ ID NO: 655 - protein, 501 aa, Oryza sativa subsp. japonica
  misc_feature: Public GI ID no.115484119
  misc_feature: Bit score of 699.4 for HMM based on sequences of FIGURE 7.
  misc_feature (230)..(493): Pfam Name: p450 Pfam Description: Cytochrome P450
  misc_feature: Functional Homolog Of Ceres SEEDLINE ID no. ME06336 at SEQ ID NO. 441
MAAAALLLLAAAAAIVVVAMVLRWLLLLGGPAAGRLGKRALMPPGSTGLPLIGETLRLISAYKTPNPEPFIDERVARHGGVFTTHVFGERTVFSADPAFNRLLLAAEGRAVHSSYPSSIATLLGARSLLLTRGAAHKRLHSLTLTRLGRPASPPLLAHIDRLVLATMRQWEPAATVRLMDEAKKITFNLTVKQLVSIEPGPWTESLRREYVKLIDGFFSIPFPLANLLPFTTYGQALKARKKVAGALREVIKKRMEEKAENGGSIGDDEGKKEKKDMVEELLEAEGGSFSEEEMVDFCLSLLVAGYETTSMLMTLAVKFLTETPAALAELKEEHANIRDMKGKKQPLEWSDYKSMPFTQCVINETLRVGNIISGVFRRANTDIHYKDYTIPKGCKIFASFRAVHLNNEHYENARTFNPWRWQINNKLQNAVGANIFTPFGGGPRLCPGYELARVVVSIFLHHLVTRFSWEETEEDRLVFFPTTRTLKGYPINLRLLSESIC

SEQ ID NO: 656 - DNA, 1392 bp, Populus balsamifera subsp. trichocarpa
  misc_feature: Ceres ANNOT ID no.1510523
  misc_feature: Encodes the peptide sequence at SEQ ID NO. 657
atggaacaaaagagtggagtgcttccaaagggaagctttggctggcctctgataggagaaactcttgacttcattgctgctggctacacttctcaacctgttagtttcatggagaaacgcagatcactgtacgggaaggtgttcaaaacacacatcctggggacacccatcatagtatccacggatccagcagtgaacaaagttgttttacaaaaccatggcaacatttttattcctgcttatcctaaatcagtcagggaaatatttggagaatattctatacttcaaaccaatggaactctacagaagaaggtccatgcacttattggtggtttcttgaggtcaccacagttcaaaactagaattaccaaagacattgagcaccatgtcaaactcaccttgacttcttggaaggacctgccccttctattcgtccaagaagaaacccaaaagttcacgttcaaagtcttggttaaagcattgctaagtcttgatccaagtgatgatttggattttcttaagagagaattcgatgaattcatcaaagggttgatatgtctgccgatcaaattaccaggaacaagattatacaaatccttaaaggctaaagagagaatattcaagctagtaaaaaagattgttgagcaaagaaaattgggcttggagaaatcagaagatcaagaacatcaaaatacaatccctaatgatgcggtggacgtgcttttacgtgacatttctggtgaacaaaatgacaagcaatctctatcgttggatttcatcatttcacatattattgagctgatgatccctggagaagaaaccgtgcctatgtccatgaccttagctgtcaaattcctcagtgactgccctgtcgctctagagctattaacggaggagaacatgaaattgaagaggcagaagactgattctggtgatgattattgttggactgattacatgtccttgcaatttactcagaatgtgataaatgaaactcttagagtagcaaacataatcaatgcagtttggaggaaagctctcaaggatgtagagatcaaaggaattctgattcccgaaggatggtgtgtcctgacatctttcagctctgtacatatggatgaagaaaattatgaaaacccacatgagtttgatccatggagatgggagaaaacaggagcttctgttaagaacaattgctttacaccttttggaggtggacaaaggctatgccctggtctagaactatccaggcttgaaatctccatcttccttcaccatcttgtcacaacttacagatggattgctgaaaaggatgacattatttactttccaacagtgaagttaaagaaaaagctgcctatcagagtcacctccataggcaactcttcatga

SEQ ID NO: 657 - protein, 463 aa, Populus balsamifera subsp. trichocarpa
  misc_feature: Ceres ANNOT ID no.1510523
  misc_feature: Bit score of 624.6 for HMM based on sequences of FIGURE 7.
  misc_feature (194)..(458): Pfam Name: p450 Pfam Description: Cytochrome P450
  misc_feature: Functional Homolog Of Ceres SEEDLINE ID no. ME06336 at SEQ ID NO. 441
MEQKSGVLPKGSFGWPLIGETLDFIAAGYTSQPVSFMEKRRSLYGKVFKTHILGTPIIVSTDPAVNKVVLQNHGNIFIPAYPKSVREIFGEYSILQTNGTLQKKVHALIGGFLRSPQFKTRITKDIEHHVKLTLTSWKDLPLLFVQEETQKFTFKVLVKALLSLDPSDDLDFLKREFDEFIKGLICLPIKLPGTRLYKSLKAKERIFKLVKKIVEQRKLGLEKSEDQEHQNTIPNDAVDVLLRDISGEQNDKQSLSLDFIISHIIELMIPGEETVPMSMTLAVKFLSDCPVALELLTEENMKLKRQKTDSGDDYCWTDYMSLQFTQNVINETLRVANIINAVWRKALKDVEIKGILIPEGWCVLTSFSSVHMDEENYENPHEFDPWRWEKTGASVKNNCFTPFGGGQRLCPGLELSRLEISIFLHHLVTTYRWIAEKDDIIYFPTVKLKKKLPIRVTSIGNSS

SEQ ID NO: 658 - DNA, 1799 bp, Zea mays
  misc_feature: Ceres CLONE ID no.339347
  misc_feature: Encodes the peptide sequence at SEQ ID NO. 659
ctataaataaataccgcccaccaacatctggtggtatcaaagaatctcctctgtatctctggcagccgcatcgtctcaatctcagtcactcccggacacgcgcacgagccaccccgcacccaactaaccaacccatggacgcgggcggaacgccgccgctgctgttcctcctggccgcggcggccgccctgctgggcgcggcgctcaggtggctgctcctggcctggcggtcggcggcgaggacggggcggctgccaccgggcagcacggggctgccgctcatcggggagacgctgcgcctcatcgcggcgtacaagacgccgaacccggagccgttcatcgacgagcgcgtggcgcggcacggcagcggggtgttcacgacgcacgtgttcggcgagcgcaccgtgttctccgcggacccggccttcaaccgcctgctcctggccgccgagggccgcgccgtcagctgcagctacccgtcgtccatcgccacgctgctgggcccgcgctcgctgctcctcaccgccggccccgcgcacaagcgcctccactcgctcacgctcgcccgcctcggccggccggcctcgccgccgctgctggcgcacatcgaccgcctcgtcctcgccaccctgcgggactggggccggccaggcgccggcgccgtcgtccgcctcctcgacgaggccaagaagatcaccttcaacctcactgtctggcagctcgtcagcatcgagcctgggccctggaccgagagcctccgccgcgagtacgtcaagctcgtcgacggcttcttctccatccccttccccttcgcctacctcctccctttcaccgcctacggccaggccctcaaggcgaggaagaaggtggctggagctcttcgggaggtgataaggaagaggatgggcgaggaggccggaactggccctggcgccggtagaaatggggagaagaaggacatggtggaggagcttctggaagcagagggtgggagcttctcggtggaggagatggtggatttctgcctgtctctgctggtggctggctacgagaccacctccgtgctcatgacgctcgccgtcaagttcctcaccgagacgcccactgcactggcgcagctcaaggaagagcacgacagcatcagacacaggaaaggcaaggacgagcagcctctgcaatggagcgattacaagtcgatgccgtttacacaatgcgtgatcagtgagacgctgcgcgtggctaacttgatcagcggggtgttcaggcgggcgaacaccgacatccatttcaaagattacgttatcccaaagggctgcagaatcttcgcgtcgttccgagccgtgcacctgagccccgagcactacgagaacgctcgagccttcgacccctggagatggcagcagagcaagaaggagggagtactagtagtagggcaggacgcgcagcagggggccagggccagcgtgttcactcccttcggcggggggcctcgcctgtgcccgggccacgagcttgcccgcgtcgtggtctccgttttcctccaccgcctggtgacgcgcttcagctgggaagaggctgaggaggacagggtcgtcttcttccccaccacccgcaccctcaaagggtaccccatcatcctgcggcggcgaccgggttgggatttctgacctagctcatcatgttacaatagagtcgatccatctatagttgttacactcatctctctctctctctctctctctgtctgtaataacactactgtctaatataaacaagcatctccgctctattctgttcag

SEQ ID NO: 659 - protein, 510 aa, Zea mays
  misc_feature: Ceres CLONE ID no.339347
  misc_feature: Bit score of 669.4 for HMM based on sequences of FIGURE 7.
  misc_feature (223)..(504): Pfam Name: p450 Pfam Description: Cytochrome P450
  misc_feature: Functional Homolog Of Ceres SEEDLINE ID no. ME06336 at SEQ ID NO. 441
MDAGGTPPLLFLLAAAAALLGAALRWLLLAWRSAARTGRLPPGSTGLPLIGETLRLIAAYKTPNPEPFIDERVARHGSGVFTTHVFGERTVFSADPAFNRLLLAAEGRAVSCSYPSSIATLLGPRSLLLTAGPAHKRLHSLTLARLGRPASPPLLAHIDRLVLATLRDWGRPGAGAVVRLLDEAKKITFNLTVWQLVSIEPGPWTESLRREYVKLVDGFFSIPFPFAYLLPFTAYGQALKARKKVAGALREVIRKRMGEEAGTGPGAGRNGEKKDMVEELLEAEGGSFSVEEMVDFCLSLLVAGYETTSVLMTLAVKFLTETPTALAQLKEEHDSIRHRKGKDEQPLQWSDYKSMPFTQCVISETLRVANLISGVFRRANTDIHFKDYVIPKGCRIFASFRAVHLSPEHYENARAFDPWRWQQSKKEGVLVVGQDAQQGARASVFTPFGGGPRLCPGHELARVVVSVFLHRLVTRFSWEEAEEDRVVFFPTTRTLKGYPIILRRRPGWDF

SEQ ID NO: 660 - protein, 524 aa, Arabidopsis thaliana
  misc_feature: Public GI ID no.13878393
  misc_feature: Bit score of 679.5 for HMM based on sequences of FIGURE 7.
  misc_feature (368)..(511): Pfam Name: p450 Pfam Description: Cytochrome P450
  misc_feature: Functional Homolog Of Ceres SEEDLINE ID no. ME06336 at SEQ ID NO. 441
MQPPASAGLFRSPENLPWPYNYMDYLVAGFLVLTAGILLRPWLWFRLRNSKTKDGDEEEDNEEKKKGMIPNGSLGWPVIGETLNFIACGYSSRPVTFMDKRKSLYGKVFKTNIIGTPIIISTDAEVNKVVLQNHGNTFVPAYPKSITELLGENSILSINGPHQKRLHTLIGAFLRSPHLKDRITRDIEASVVLTLASWAQLPLVHVQDEIKKMTFEILVKVLMSTSPGEDMNILKLEFEEFIKGLICIPIKFPGTRLYKSLKAKERLIKMVKKVVEERQVAMTTTSPANDVVDVLLRDGGDSEKQSQPSDFVSGKIVEMMIPGEETMPTAMTLAVKFLSDNPVALAKLVEENMEMKRRKLELGEEYKWTDYMSLSFTQNVINETLRMANIINGVWRKALKDVEIKGYLIPKGWCVLASFISVHMDEDIYDNPYQFDPWRWDRINGSANSSICFTPFGGGQRLCPGLELSKLEISIFLHHLVTRYSWTAEEDEIVSFPTVKMKRRLPIRVATVDDSASPISLEDH

SEQ ID NO: 661 - protein, 457 aa, Arabidopsis thaliana
  misc_feature: Public GI ID no.25282635
  misc_feature: Bit score of 643.8 for HMM based on sequences of FIGURE 7.
  misc_feature (301)..(444): Pfam Name: p450 Pfam Description: Cytochrome P450
  misc_feature: Functional Homolog Of Ceres SEEDLINE ID no. ME06336 at SEQ ID NO. 441
MIPNGSLGWPVIGETLNFIACGYSSRPVTFMDKRKSLYGKVFKTNIIGTPIIISTDAEVNKVVLQNHGNTFVPAYPKSITELLGENSILSINGPHQKRLHTLIGAFLRSPHLKDRITRDIEASVVLTLASWAQLPLVHVQDEIKKMTFEILVKVLMSTSPGEDMNILKLEFEEFIKGLICIPIKFPGTRLYKSLKAKERLIKMVKKVVEERQVAMTTTSPANDVVDVLLRDGGDSEKQSQPSDFVSGKIVEMMIPGEETMPTAMTLAVKFLSDNPVALAKLVEENMEMKRRKLELGEEYKWTDYMSLSFTQNVINETLRMANIINGVWRKALKDVEIKGYLIPKGWCVLASFISVHMDEDIYDNPYQFDPWRWDRINGSANSSICFTPFGGGQRLCPGLELSKLEISIFLHHLVTRYSWTAEEDEIVSFPTVKMKRRLPIRVATVDDSASPISLEDH

SEQ ID NO: 662 - protein, 524 aa, Arabidopsis thaliana
  misc_feature: Public GI ID no.18419825
  misc_feature: Bit score of 678.2 for HMM based on sequences of FIGURE 7.
  misc_feature (368)..(511): Pfam Name: p450 Pfam Description: Cytochrome P450
  misc_feature: Functional Homolog Of Ceres SEEDLINE ID no. ME06336 at SEQ ID NO. 441
MQPPASAGLFRSPENLPWPYNYMDYLVAGFLVLTAGILLRPWLWLRLRNSKTKDGDEEEDNEEKKKGMIPNGSLGWPVIGETLNFIACGYSSRPVTFMDKRKSLYGKVFKTNIIGTPIIISTDAEVNKVVLQNHGNTFVPAYPKSITELLGENSILSINGPHQKRLHTLIGAFLRSPHLKDRITRDIEASVVLTLASWAQLPLVHVQDEIKKMTFEILVKVLMSTSPGEDMNILKLEFEEFIKGLICIPIKFPGTRLYKSLKAKERLIKMVKKVVEERQVAMTTTSPANDVVDVLLRDGGDSEKQSQPSDFVSGKIVEMMIPGEETMPTAMTLAVKFLSDNPVALAKLVEENMEMKRRKLELGEEYKWTDYMSLSFTQNVINETLRMANIINGVWRKALKDVEIKGYLIPKGWCVLASFISVHMDEDIYDNPYQFDPWRWDRINGSANSSICFTPFGGGQRLCPGLELSKLEISIFLHHLVTRYSWTAEEDEIVSFPTVKMKRRLPIRVATVDDSASPISLEDH

SEQ ID NO: 663 - protein, 501 aa, Oryza sativa subsp. japonica
  misc_feature: Public GI ID no.60677683
  misc_feature: Bit score of 696.7 for HMM based on sequences of FIGURE 7.
  misc_feature (230)..(493): Pfam Name: p450 Pfam Description: Cytochrome P450
  misc_feature: Functional Homolog Of Ceres SEEDLINE ID no. ME06336 at SEQ ID NO. 441
MAAAALLLLAAAAAIVVVAMVLRWLLLLGGPAAGRLGKRALMPPGSTGLPLIGETLRLISAYKTPNPEPFIDERVARHGGVFTTHVFGERTVFSADPAFNRLLLAAEGRAVHSSYPSSIATLLGARSLLLTRGAAHKRLHSLTFTRLGRPASPPLLAHIDRLVLATMRQWEPAATVRLMDEAKKITFNLTVKQLVSIEPGPWTESLRREYVKLIDGFFSIPFPLANLLPFTTYGQALKARKKVAGALREVIKKRMEEKAENGGSIGDDEGKKEKKDMVEELLEAEGGSFSEEEMVDFCLSLLVAGYETTSMLMTLAVKFLTETPAALAELKEEHANIRDMKGKKQPLEWSDYKSMPFTQCVINETLRVGNIISGVFRRANTDIHYKDYTIPKGCKIFASFRAVHLNNEHYENARTFNPWRWQINNKLQNAVGANIFTPFGGGPRLCPGYELARVVVSIFLHHLVTRFSWEETEEDRLVFFPTTRTLKGYPINLRLLSESIC

SEQ ID NO: 664 - protein, 501 aa, Oryza sativa subsp. indica
  misc_feature: Public GI ID no.125535723
  misc_feature: Bit score of 701.6 for HMM based on sequences of FIGURE 7.
  misc_feature (230)..(493): Pfam Name: p450 Pfam Description: Cytochrome P450
  misc_feature: Functional Homolog Of Ceres SEEDLINE ID no. ME06336 at SEQ ID NO. 441
MAAAALLLLAAAAAAVVVAMALRWLLLLGGPAAGRQGKRARMPPGSTGLPLIGETLRLISAYKTPNPEPFIDERVARHGGVFTTHVFGERTVFSADPAFNRLLLAAEGRAVHSSYPSSIATLLGARSLLLTRGAAHKRLHSLTLTRLGRPASPPLLAHIDRLVLATMRQWEPAATVRLMDEAKKITFNLTVKQLVSIEPGPWTESLRREYVKLIDGFFSIPFPLACLLPFTTYGQALKARKKVAGALREVIKKRMEEKAENGGSIGDDEGKKEKKDMVEELLQAEGGSFSEEEMVDFCLSLLVAGYETTSVLMTLAVKFLTETPAALAELKEEHANIRDMKGKNQPLEWSDYKSMPFTQCVINETLRVGNIISGVFRRANTDIHYKDYTIPKGCKIFASFRAVHLNNEHYENARTFNPWRWQINNKLQNAVGANIFTPFGGGPRLCPGYELARVVVSIFLHHLVTRFSWEETEEDRLVFFPTTRTLKGYPINLRLLSESIC

SEQ ID NO: 665 - protein, 471 aa, Zinnia elegans
  misc_feature: Public GI ID no.71834072
  misc_feature: Bit score of 795.9 for HMM based on sequences of FIGURE 7.
  misc_feature (214)..(464): Pfam Name: p450 Pfam Description: Cytochrome P450
  misc_feature: Functional Homolog Of Ceres SEEDLINE ID no. ME06336 at SEQ ID NO. 441
MITIDLLLSPLSLLLLSLSTILIILHTTTSSRRNHHSPPGATGIPFIGETLQLISAYKTENPEPFIDTRVEKYGVVFTTHVFGERTVFSADGETNRFILKNEGRLFESSYPGSIANLVGKNSLLLMRGGLHRRMHSLTMSFANSTIIKDHLLVDIDRLVRLNLDAWTGRILLMDEAKKITFELTLKQLLSIEPFEWSENLRKEYMLVIEGFFCIPLPFFPLTYRRAIQARKRVTEALHLVVRERRVERERGVKKNDMLAALFDNDCDDDEIVDLLVSLLVAGYDTTPTTMTLAVKYLTDTPSALAQLKEEHEQITRKKGALVALEWDDYKSMPFTQCVVNETLRLSNIISGVFRRAMTDVKIKDFTIPKGSKVFASLRAVHLDLENFEDARVFYPWRWQKISDPANFMPFGGGPRRCPGHELARVALSVFLHHLITRFSWIPAEEDKLVFFPTTRTQKRYPIIVQKRNVVE

SEQ ID NO: 666 - protein, 524 aa, Arabidopsis thaliana
  misc_feature: Public GI ID no.110736225
  misc_feature: Bit score of 672.2 for HMM based on sequences of FIGURE 7.
  misc_feature (368)..(511): Pfam Name: p450 Pfam Description: Cytochrome P450
  misc_feature: Functional Homolog Of Ceres SEEDLINE ID no. ME06336 at SEQ ID NO. 441
MQPPASAGLFRSPENLPWPYNYMDYLVAGFLVLTAGILLRPWLWLRLRNSKTKDGDEEEDNEEKKKGMIPNGSLGWPVIGETLNFIACGYSSRPVTFMDKRKSLYGKVFKTNIIGTPIIISTDAEVNKVVLQNHGNTFVPAYPKSITELLGENSILSINGPHQKRLHTLIGAFLRSPHLKDRITRDIEASVVLTLASWAQLPLVHVQDEIKKMTFEILVKVLMSTSPGEDMNILKLEFEEFIKGLICIPIKSPGTRLYKSLKAKERLIKMVKKVVEERQVAMTTTSPANDVVDVLLRDGGDSEKQSQPSDFVSGKIVEMMIPGEETMPTAMTLAVKFLSDNPVALAKLVEENMEMKRRKLELGEEYKWTDYMSLSFTQNVINETLRMANIINGVWRKALKDVEIKGYLIPKGWCVLASFISVHMDEDIYDNPYQFDPWRWDRINGSANSSICFTPFGGGQRLCPGLELSKLEISIFLHHLVTRYSWTAEEDEIVSFPTVKMKRRLPIRVATVDDSASPISLEDH

SEQ ID NO: 667 - DNA, 1921 bp, Zea mays
  misc_feature: Ceres CLONE ID no.1584356
  misc_feature: Encodes the peptide sequence at SEQ ID NO. 668
gtggctggtggtgccaaagaatctcttatctctggcaacagcgcatcactcacacaatctgtcactccccgacacgcgcacgagctccactccccactccgcacccaacccaaggcgccactgccatggacgcgggcggtccgccgccgctgttcctcctgggcgccgtgctggccgcggcgctggggtggctgctcgtggtctggcgggcggcggcggggcggcggcggtccgcgtcggcgcggctgccgccggggagcacggggctgccgctcatcggggagacgctgcggctcatcgcggcgtacaagtcgccgaacccggagccgttcatcgacgagcgcgtggcgcggcacggcagcggggtgttcacgacgcacgtgttcggcgagcgcaccgtgttctccgccgacccggccttcaaccgcctgctgctggccgcggagggccgcgccgtgagctgcagctacccgtcgtccatcgccacgctgctgggcccgcggtcgctgctgctcacctcgggccccgcgcacaagcgcctccactcgctcacgctgacccgcctcggccgcccggcctcgccgccgctgctggcgcacatcgaccgcctcgtcctcgccaccatgaggggctgggaccgccccggcgccggcgccatgcgcctcctcgacgaggccaagaagatcaccttcaacctcaccgtgtggcagctcgtcagcatcgagcctgggccgtggaccgagagcgtccggcgcgagtacgtgaagctcgtcgacggcttcttctccatccccttccccttcgcctccctcctcccgttcaccgtctacggccaggccctcaaggcgaggaagaaggtggccggagctcttcgggaggtggtaaggaagaggatggacgacaaggcggaggacgactgtggcgccagtaagaagaacggggagaagaaggacatggtggaggagctcctagaagcggagggcgggagcttctccgtggaggagatggtggacttctgcctgtccctgctggtggctgggtacgagaccacctccgtgctcatgacgctcgccgtcaagttcctcaccgagacacccaccgcactggcgcagctcaaggaagagcacgacagcatcagaggggtaaaaggcaaaggccaagctctggaatggagcgattacaagtcgatgccgtttacacaatgcgtgataagcgaaacgctgcgcgtggccaacctgatcagcggggtgttcaggcgtgcgaacaccgacatccacttcaaaggccacgtgatcccaaagggctgcaagatcttcgcgtcgttccgagccgtgcaccttagcctggaccactacgagaacgcccggaccttcgacccttggagatggcagcagggcaagagcaagctgcagagcgcggaaggggccagtctgttcacgccgttcggcggcgggccgcgcctgtgcccgggctacgagctcgcccgggtggtggtttccgtcttcctccaccacctcgtcacgcgctttagctgggaggaagccgaggaggacaggattgtcttcttccccaccacccggaccctcaagggataccccatcatcctacggcggcgaccggattgcgatgatctctgacctcatggctaggttccccccttatcttcttcggatcaaggctgaaggctaagcattagatagagtaaggtggatgtcgtcgtggctagtaggtgcatggtggtttctgccactcactcactcactcactctgttgtctgtttgttcctgttcctctctgttttctcttgctctgtaacctggacctggtacgagtcagcactcagcagccagcagcaaactcgcgttttgcttgtaaaatctaaaatctgatatgagatgcagatgcccccgcgactgagacg

SEQ ID NO: 668 - protein, 503 aa, Zea mays
  misc_feature: Ceres CLONE ID no.1584356
  misc_feature: Bit score of 661.7 for HMM based on sequences of FIGURE 7.
  misc_feature (210)..(496): Pfam Name: p450 Pfam Description: Cytochrome P450
  misc_feature: Functional Homolog Of Ceres SEEDLINE ID no. ME06336 at SEQ ID NO. 441
MDAGGPPPLFLLGAVLAAALGWLLVVWRAAAGRRRSASARLPPGSTGLPLIGETLRLIAAYKSPNPEPFIDERVARHGSGVFTTHVFGERTVFSADPAFNRLLLAAEGRAVSCSYPSSIATLLGPRSLLLTSGPAHKRLHSLTLTRLGRPASPPLLAHIDRLVLATMRGWDRPGAGAMRLLDEAKKITFNLTVWQLVSIEPGPWTESVRREYVKLVDGFFSIPFPFASLLPFTVYGQALKARKKVAGALREVVRKRMDDKAEDDCGASKKNGEKKDMVEELLEAEGGSFSVEEMVDFCLSLLVAGYETTSVLMTLAVKFLTETPTALAQLKEEHDSIRGVKGKGQALEWSDYKSMPFTQCVISETLRVANLISGVFRRANTDIHFKGHVIPKGCKIFASFRAVHLSLDHYENARTFDPWRWQQGKSKLQSAEGASLFTPFGGGPRLCPGYELARVVVSVFLHHLVTRFSWEEAEEDRIVFFPTTRTLKGYPIILRRRPDCDDL

SEQ ID NO: 669 - protein, 472 aa, Arabidopsis thaliana
  misc_feature: Public GI ID no.30682922
  misc_feature: Bit score of 456.2 for HMM based on sequences of FIGURE 7.
  misc_feature (209)..(467): Pfam Name: p450 Pfam Description: Cytochrome P450
  misc_feature: Functional Homolog Of Ceres SEEDLINE ID no. ME06336 at SEQ ID NO. 441
MWALLIWVSLLLISITHWVYSWRNPKCRGKLPPGSMGFPLLGESIQFFKPNKTSDIPPFIKERVKKYGPIFKTNLVGRPVIVSTDADLSYFVFNQEGRCFQSWYPDTFTHIFGKKNVGSLHGFMYKYLKNMVLTLFGHDGLKKMLPQVEMTANKRLELWSNQDSVELKDATASMIFDLTAKKLISHDPDKSSENLRANFVAFIQGLISFPFDIPGTAYHKCLQGRAKAMKMLRNMLQERRENPRKNPSDFFDYVIEEIQKEGTILTEEIALDLMFVLLFASFETTSLALTLAIKFLSDDPEVLKRLTEEHETILRNREDADSGLTWEEYKSMTYTFQFINETARLANIVPAIFRKALRDIKFKDYTIPAGWAVMVCPPAVHLNPEMYKDPLVFNPSRWEGSKVTNASKHFMAFGGGMRFCVGTDFTKLQMAAFLHSLVTKYRWEEIKGGNITRTPGLQFPNGYHVKLHKKRD

SEQ ID NO: 670 - DNA, 1572 bp, Populus balsamifera subsp. trichocarpa
  misc_feature: Ceres ANNOT ID no.1458265
  misc_feature: Encodes the peptide sequence at SEQ ID NO. 671
atggcggtttctgtttgtcttgttctctttattgttctcccagcgatagtctttatcgttcacaggagttcccggttccggaggctccggctgccgccggggagtttgggtctgccctttgttggagagactctacagctgatatctgcatacaagactgagaaccctgaaccgtttatagatgagcgggtgaaccggttcggttcgttgtttaaaacccatatttttggtgaaccgaccgttttttctgttgacccggaaacgaacaggttcattttgcaaaatgaagggaagctgtttgagtgtagttaccccggttcgataagcaacctgctgggaaaacattctttgttgctaatgacgggtaatcttcacaaaaaaatgcattccttaaccatgagtttcgctaactcttcaatcatcagagaccatctcttggtcgatatagaccggttgatccgtctcaatttagattcttggtccgaccgggttcttctcatggaggaggccaagaagggaattaaactggtgggtgacaaacattccaagcatactacatttgagttgacaatgaagcagctaatgagctttgatccatgtgaatggaccgagagtctgagaagagagtacgtgcttgttattgaaggctttttcagcgtgcctctacccatcctttcccccacataccgcagagctatcaaagctaggactaaggtggcagaggctttgagtttggtagtgaagcaaaggaggatagagagtgagtcaggagagaaaaagaaagacatgcttggagctcttttagcttcagatgatcatggaggcttctcggacgaggagatagtagatttcttggtggctctgcttgttgcaggctatgaaactacatctacaagcatgactcttgctgttaagttcctcaccgagacacctctggctctggctcagatcaagagatcggggaagtcagagactaaatatgcccctgtaccccggcgagtcgtattgggatcatcggaaacactcgtctctgatttcgatgaagaagatcatccaacggcggtgaccgatgaggagcatgaacagattagaggaaagaagggcgaggagggagctcttgagtggagtgattacaagtcaatgaccttcactcagtgtgttgttaatgagactttgagaatagcaaacataataggtgggatatttagacgaacaatgacagatataaatgttaaaggttatacaattcctaaaggatggaaggtttttgcatcctttcgtggtgtacatttagaccatgaatacttcaaagatgctcgaactttcaatccgtggagatggcaggacgactcgggggcaacatgcccagcaaatgtgttcactccttttggaggagggcaacggttatgcccaggatatgaacttgctagagtagaactctctgttttccttcaccacctggtcacccgtttcagttggaccccagctgaacaagacaagctggttttctttccaactacgcggacacaaaagcgatatcccatcaatgtgcagcgtcgaaatcgtgtctaa

SEQ ID NO: 671 - protein, 523 aa, Populus balsamifera subsp. trichocarpa
  misc_feature: Ceres ANNOT ID no.1458265
  misc_feature: Bit score of 811.3 for HMM based on sequences of FIGURE 7.
  misc_feature (358)..(517): Pfam Name: p450 Pfam Description: Cytochrome P450
  misc_feature: Functional Homolog Of Ceres SEEDLINE ID no. ME06336 at SEQ ID NO. 441
MAVSVCLVLFIVLPAIVFIVHRSSRFRRLRLPPGSLGLPFVGETLQLISAYKTENPEPFIDERVNRFGSLFKTHIFGEPTVFSVDPETNRFILQNEGKLFECSYPGSISNLLGKHSLLLMTGNLHKKMHSLTMSFANSSIIRDHLLVDIDRLIRLNLDSWSDRVLLMEEAKKGIKLVGDKHSKHTTFELTMKQLMSFDPCEWTESLRREYVLVIEGFFSVPLPILSPTYRRAIKARTKVAEALSLVVKQRRIESESGEKKKDMLGALLASDDHGGFSDEEIVDFLVALLVAGYETTSTSMTLAVKFLTETPLALAQIKRSGKSETKYAPVPRRVVLGSSETLVSDFDEEDHPTAVTDEEHEQIRGKKGEEGALEWSDYKSMTFTQCVVNETLRIANIIGGIFRRTMTDINVKGYTIPKGWKVFASFRGVHLDHEYFKDARTFNPWRWQDDSGATCPANVFTPFGGGQRLCPGYELARVELSVFLHHLVTRFSWTPAEQDKLVFFPTTRTQKRYPINVQRRNRV

SEQ ID NO: 672 - DNA, 1834 bp, Panicum virgatum
  misc_feature: Ceres CLONE ID no.1786280
  misc_feature: Encodes the peptide sequence at SEQ ID NO. 673
aagccaaaccgcacacggccacgccgcccatggacgcgagcggggcgccgccgcccctcctggccgtgtcctccttcgccgcggccgcgctgctcttcgccgcggtgctggggtggctcttcgccgcgcggtcgtccaagcgcgggtcggcgcggctgccgccgggcagcacggggctgccgctcatcggggagacgctgcgcctcatctccgcctacaagacccccaacccggagcccttcatcgacgaccgcgtggcgcgccacggcagcggcgtcttcaccacccacatcttcggcgagcgcaccgtcttctccgccgacccggccttcaaccgcctcctcctcgccgccgagggccgcgccgtcggctgcagctacccgtcctccatcgccacgctgctcggcccgcactcgctgctcctcaccaggggccccgcgcaccgccgcctccacacgctcacgctcacccgcctcggccgccccgcgtcgccgccgctcctcgcctacatcgaccgcctcgtcctcgccaccatgcgggagtgggagcccgccgccaccgtccgcctcctcgacgaggccaagaagatcaccttcaacctcaccgtcaagcagctcgtcagcatcgaccccggcccgtggaccgagagcgtccgccgcgagtacgtcaagctcatcgacggcttcttctccatcccgttccccttcgcccacctccttcctttcaccacctacggccaggccctcaaggcgaggaagaaggtggccggggctctgcgggaggtgataaggaagaggatggacgacaagctggaaaatggttgcgcgaacgggaaggaggatgacaagattgagaagaaggacatggtggaggagcttcttgaagcagagggtgggagcttctccgaggaggaaatggtggatttctgcctgtctctgctggtggctggctacgagacgacgtccgtgctcatgacgcttgctgtcaagttcctcaccgagacacccactgcgctggcgcagctcaaggaagagcatgaaaatatcagagacgtaaaaggcaaaaatcaacctctggaatggagcgatttcaagtcaatgccatttacacaatgtgtgataaatgaaacattgcgtgttgctaacttaattagtggggtattcaggcgtgcaaacactgatattcattttaaagactacgttattccaaagggctgcaaaatatttgcttcattccgagctgtgcaccttaatactgaacactatgagaatgctcggacctttgatccctggagatggcagagtaagaataaactccagaacgcagtaggggccagcttgtttactccctttggtggcggacctcgtctgtgcccaggctatgagcttgcccgggttgttgtttctgtttttctccatcatcttgtgacacgctttagttgggaagaagctgaggaagataggattgtcttcttccccaccacccgaactctcaaaggataccccatcaatctccggcggcgaccagattctgttttctgacctcgcattaggttccagttacccttatggtctaagcaagagtaagcatagataagaaaaatgtccccagtagtcagtgaaattttatctgtaacttggcgcagaaagcagtcggcaaacttggttttgcttgtaaaatgacccaaactgctatgcaatgcgtactggttacagataacattttgccgtgtattatttggctatcctaagatccagcaaagatcttgctagtcgttatatcgctgtcctaacaattgacaaatgatgtgatgattttgtacgatttggtgggc

SEQ ID NO: 673 - protein, 503 aa, Panicum virgatum
  misc_feature: Ceres CLONE ID no.1786280
  misc_feature: Bit score of 690.8 for HMM based on sequences of FIGURE 7.
  misc_feature (232)..(497): Pfam Name: p450 Pfam Description: Cytochrome P450
  misc_feature: Functional Homolog Of Ceres SEEDLINE ID no. ME06336 at SEQ ID NO. 441
MDASGAPPPLLAVSSFAAAALLFAAVLGWLFAARSSKRGSARLPPGSTGLPLIGETLRLISAYKTPNPEPFIDDRVARHGSGVFTTHIFGERTVFSADPAFNRLLLAAEGRAVGCSYPSSIATLLGPHSLLLTRGPAHRRLHTLTLTRLGRPASPPLLAYIDRLVLATMREWEPAATVRLLDEAKKITFNLTVKQLVSIDPGPWTESVRREYVKLIDGFFSIPFPFAHLLPFTTYGQALKARKKVAGALREVIRKRMDDKLENGCANGKEDDKIEKKDMVEELLEAEGGSFSEEEMVDFCLSLLVAGYETTSVLMTLAVKFLTETPTALAQLKEEHENIRDVKGKNQPLEWSDFKSMPFTQCVINETLRVANLISGVFRRANTDIHFKDYVIPKGCKIFASFRAVHLNTEHYENARTFDPWRWQSKNKLQNAVGASLFTPFGGGPRLCPGYELARVVVSVFLHHLVTRFSWEEAEEDRIVFFPTTRTLKGYPINLRRRPDSVF

SEQ ID NO: 674 - DNA, 1434 bp, Populus balsamifera subsp. trichocarpa
  misc_feature: Ceres ANNOT ID no.1438753
  misc_feature: Encodes the peptide sequence at SEQ ID NO. 675
atgtgggctttgttctttggagctttgattattataagcattacacattgggtttaccgctggagaaaccccagatgcaatggcactctcccaccaggttcaatgggattgccacttattggcgagacccttcagttcttcgctccaaatacttcttgtgacatttctccatttgtcagagacaggatgaaaagatatggaccaatattccggactaatttggtcggaaggccagttgtagtatcaacagatccggatctcaattactttatcttccaacaagaaggaaaattgttccagagctggtatccggatacattcacggagatctttggaaggcaaaatgttggttcgttacatgggttcatgtacaagtatcttaagaatatggtgcttaatctcttcggtcctgaaagccttaaaaaaatgctccctgaagttgaacagacagcatcaaatagattacaactatggtctcatcaggaatcagttgaattgaaagaagcaactgcaactatgatatttgatctgacggcgaagaagctgataagttatgatcaagaaaattcttcagagaatctaagggagaactttgttgcattcatacaaggattaatctccttccctttggacattccaggaacagcatatcacgaatgcttacagggtaggaaaaaggcaatgagaatgctaaagaacctgctacaggaaagacaagcaaatccgagaaagcacgaaactgatttttttgattatgtgcttgaagaacttcaaaagaacaaaacaatccttacagaggaaatcgctctggatttaatgtttgtgctgctatttgccagctttgaaacaacttccctgggtctaactttagctgtcaagtttatatcggaccacccattggtgctaaaggaattgacggaagagcacgagggaattctaaaaaatcgggaaaatgccaactctggtcttacatggaaggaatacaaatcaatgaaattcacgtttcaggtcattaatgaaactgttagactggcaaacatagttccagggatcttcagaaaaacacttagagatatccagtttaagggatataccattccagcaggctgggcagtaatggtctgtccccccgctgtacacttaaacccagcaaaatatgaagatccacttgccttcaatccatggagatggaagggtatggaagtaaatggtgcatccaaaactttcatggcctttggtggtggcatgagattttgtgttggaacagagtttaccaaggtgcagatggctgtatttctacattgcttggtcacaaagtccaggtggcaagcaatcaaaggaggaaatattgttcgaactcctggtttacaatttcccagtggttatcacattcagctcacggagagagacaaaagatataactctactacataa

SEQ ID NO: 675 - protein, 477 aa, Populus balsamifera subsp. trichocarpa
  misc_feature: Ceres ANNOT ID no.1438753
  misc_feature: Bit score of 481.1 for HMM based on sequences of FIGURE 7.
  misc_feature (224)..(437): Pfam Name: p450 Pfam Description: Cytochrome P450
  misc_feature: Functional Homolog Of Ceres SEEDLINE ID no. ME06336 at SEQ ID NO. 441
MWALFFGALIIISITHWVYRWRNPRCNGTLPPGSMGLPLIGETLQFFAPNTSCDISPFVRDRMKRYGPIFRTNLVGRPVVVSTDPDLNYFIFQQEGKLFQSWYPDTFTEIFGRQNVGSLHGFMYKYLKNMVLNLFGPESLKKMLPEVEQTASNRLQLWSHQESVELKEATATMIFDLTAKKLISYDQENSSENLRENFVAFIQGLISFPLDIPGTAYHECLQGRKKAMRMLKNLLQERQANPRKHETDFFDYVLEELQKNKTILTEEIALDLMFVLLFASFETTSLGLTLAVKFISDHPLVLKELTEEHEGILKNRENANSGLTWKEYKSMKFTFQVINETVRLANIVPGIFRKTLRDIQFKGYTIPAGWAVMVCPPAVHLNPAKYEDPLAFNPWRWKGMEVNGASKTFMAFGGGMRFCVGTEFTKVQMAVFLHCLVTKSRWQAIKGGNIVRTPGLQFPSGYHIQLTERDKRYNSTT

SEQ ID NO: 676 - DNA, 1446 bp, Populus balsamifera subsp. trichocarpa
  misc_feature: Ceres ANNOT ID no.1447391
  misc_feature: Encodes the peptide sequence at SEQ ID NO. 677
atgtgggctttgttttttggagctttgattattataagcatcacacattgggttcaccgctggagaaaccccagatgcaatggcactcttccaccaggttcaatgggattgccacttattggcgagacccttcaattcttcgctcctaatacttcttttgatatccctccctttgtcaaagaaaggatgaaaagatatggaccaatattccggactaatttggttggaaggccagttgtagtatcaacggacccggatctcaattactttatcttccaacaagagggacaattgttccagagctggtatccagatacattcacagagatttttggaaggcaaaatgtcggctcattacatgggttcatgtacaagtatcttaagaatatggtgcttaatctctttggtccagaaagccttaagaaaatgctccctgaagttgaacagacaacatccaagagattacaactatggtcccatcaagagtcagtcgaattaaaagaaacaactgcaactatgatattcgatctgacagcaaagaagctcataagttatgatcaagataattcttcggagaatctaagggacaactttgttgcattcatacacggattgatctccttccctttggacattccaggaacagcatatcacgaatgcttacggggtaggaaaaaggcaatgagaatgctaaaaaaccagctacaggaaagacgagcaaatccgagaaagtaccgaagtgattttttcgattatgtgcttgaagaacttcaggaggacagaggaatccttacagaggaaattgctctggatttaatgtttgtgctgctatttgctagctttgaaacaacttccctggctctaactttagccgtcaaatttctctcggataatccgttggtgctaaagaaactaacggaagagcacgagggaattctgagaaatcgggtagatagcaactctggtcttacatggaacgaatacaaatcaatgaaattcacatttcaggtaattaatgaaacagttagactggcaaacatagttccagggattttcagaaaagcacttagagacatccagtttaagggatataccattccagaaggttgggcagtaatggtttgtccccctgcagtacacttaagcccagaaaaatatgaagatccacttgccttcaatccatggagatgggagggattggaattaaacggtgcatcaaaaaaattcatggcttttggtggcggcatgagattttgtgttggaacagagtttaccaaggtgcagatggctgtatttctacattgcctggtcacaaagttcagatggcaagtaatcaaaggaggaaatattgttcgaactcctggtttacaatttccaagtggttatcacattcagctcatggagagagacaaaaaaatacaactcacgcaatcatatgcccagtaa

SEQ ID NO: 677 - protein, 481 aa, Populus balsamifera subsp. trichocarpa
  misc_feature: Ceres ANNOT ID no.1447391
  misc_feature: Bit score of 478.2 for HMM based on sequences of FIGURE 7.
  misc_feature (212)..(466): Pfam Name: p450 Pfam Description: Cytochrome P450
  misc_feature: Functional Homolog Of Ceres SEEDLINE ID no. ME06336 at SEQ ID NO. 441
MWALFFGALIIISITHWVHRWRNPRCNGTLPPGSMGLPLIGETLQFFAPNTSFDIPPFVKERMKRYGPIFRTNLVGRPVVVSTDPDLNYFIFQQEGQLFQSWYPDTFTEIFGRQNVGSLHGFMYKYLKNMVLNLFGPESLKKMLPEVEQTTSKRLQLWSHQESVELKETTATMIFDLTAKKLISYDQDNSSENLRDNFVAFIHGLISFPLDIPGTAYHECLRGRKKAMRMLKNQLQERRANPRKYRSDFFDYVLEELQEDRGILTEEIALDLMFVLLFASFETTSLALTLAVKFLSDNPLVLKKLTEEHEGILRNRVDSNSGLTWNEYKSMKFTFQVINETVRLANIVPGIFRKALRDIQFKGYTIPEGWAVMVCPPAVHLSPEKYEDPLAFNPWRWEGLELNGASKKFMAFGGGMRFCVGTEFTKVQMAVFLHCLVTKFRWQVIKGGNIVRTPGLQFPSGYHIQLMERDKKIQLTQSYAQ

SEQ ID NO: 678 - protein, 701 aa, Oryza sativa subsp. indica
  misc_feature: Public GI ID no.125533359
  misc_feature: Bit score of 630.9 for HMM based on sequences of FIGURE 7.
  misc_feature (230)..(470): Pfam Name: p450 Pfam Description: Cytochrome P450
  misc_feature: Functional Homolog Of Ceres SEEDLINE ID no. ME06336 at SEQ ID NO. 441
MAAAPVLLLAAAAAVVVVAMVLRWLLLLGGPAAGRLGKRALMPPGSTGLPLIGETLRLISAYKTPNPEPFIDERVARHGGVFTTHVFGERTVFSADPAFNRLLLAAEGRAVHSSYPSSIATLLGARSLLLTRGAAHKRLHSLTLTRLGRPASPPLLAHIDRLVLATMRQWEPAATVRLMDEAKKITFNLTVKQLVSIEPGPWTESLRREYVKLIDGFFSIPFPLANLLPFTTYGQALKARKKVADALREVIKKRMEEKAENGGSIGDDEGKKEKKDMVEELLEAEGGSFSEEEMVDFCLSLLVAGYETTSVLMTLAVKFLTETPAALAELKEEHANIRDMKGKKQPLEWSDYKSMPFTQCVINETLRVGNIISGVFRRANTDIHYKDYTIPKGCKIFASFRAVHLNNEHYENARTFNPWRWQINNKLQNAVGANIFTPFGGGPRLCPGYELARVVVSIFLHHLVTRFRLERFCDKFSSTVYSTYSIAHSDAQKRNLHARKFDCLTIRSLPLAHKESGSVHCAWNADHVPEPEPGVSNGHSPASASAWVGSAKRQSGQRRLTCSHSKMQLSWKAWQHGIFLISLSLSSSKASRHTEQSFSFASPGDVSSKAAMASLHAGTEPKRPLLYPSGTAAAALGLWKVGRQNKDRGRGRGRCRGSLQPPVHVVGQQQSSCGRHAPATRTRMRATLGTNEQLADREFED

SEQ ID NO: 679 - DNA, 1467 bp, Sorghum bicolor
  misc_feature: Ceres ANNOT ID no.6112764
  misc_feature: Encodes the peptide sequence at SEQ ID NO. 680
atggctggggagctcgtgctggccgctgtggcgaccctgctcgcgtcgtcgctcctggctctggtgctcagccacttcctgcctttgcttctgaatcccaaggcccccaagggaagcttcgggtggccgctcctcggcgagacgctgcggttcctcacgccgcacgcgtccaacacgctgggcggcttcctggaggatcactgctccaggtatgggcaggtgttcaagtcccacctgttctgcacccccacggtggtgtcctgcgaccaggacctcaaccacttcatcctgcagaacgaggagcggctgttccagtgcagctaccccaggccgatccatggcatcctgggcaagtcctccatgctcgtggtcctgggcgaggaccacaagcgcctcaggaacctcgccctcgccctcgtcacctccaccaagctcaagcccagctacctcggcgacatcgagaagatcgcgctgcacgtcgtcggcgcatggcgacgacacgacggcggcggcggcggcggcggcggcggcggcgtcagagtcatcgccttctgcgaggaggcaagaaagttcgcattcagtgtgatagtgaagcaggtgctggggctgtcaccagaggagccggtcactgcaaggatactggaggacttcctggccttcatgaagggcctcatctccttccctctctacatcccagggaccccatatgccaaggctgtccaggcgagggagaggatatccaacactgtgaagggcatcatcgaggagcggaggagtgctgggtcatgcaacaagggtgacttccttgacgtgctgctgtcaagcaacgagctctctgacgaggagaaagtgagcttcgtgctggactccctgctgggaggatatgagaccacctcgctcctcatctccatggtcgtttacttccttgggcagtctgctcaagatctggacctggttaagagggagcacgacagcataagatccaacaaagggaaggaggagtgcttgacttcagaagactacaagaagatggaatatacccaacaagttatcaacgaggcgctgagatgtggcaacattgtcaagtttgtccaccggaaggcgctcaaagatgtcaaatacaaagagtatctgattccatctggctggaaggtcctaccggtcttcagcgctgttcatctgaacccctcacttcatggaaacgcacaacagtttcagccctgtagatgggaggggacaagccaagggacaagcaagaggtttacaccgttcggtggtggcccccggctctgcccaggatcagagcttgctaaagtagaggctgctttcttcctccatcaccttgtcctcaattatagatggagaattgatggcgatgacattccgatggcatacccatatgtggagtttcagagaggtctgccaatagaaatcgagccaacttcacctgaatctggactgtcctga

SEQ ID NO: 680 - protein, 488 aa, Sorghum bicolor
  misc_feature: Ceres ANNOT ID no.6112764
  misc_feature: Bit score of 1211.0 for HMM based on sequences of FIGURE 7.
  misc_feature (229)..(466): Pfam Name: p450 Pfam Description: Cytochrome P450
  misc_feature: Functional Homolog Of Ceres SEEDLINE ID no. ME06336 at SEQ ID NO. 441
MAGELVLAAVATLLASSLLALVLSHFLPLLLNPKAPKGSFGWPLLGETLRFLTPHASNTLGGFLEDHCSRYGQVFKSHLFCTPTVVSCDQDLNHFILQNEERLFQCSYPRPIHGILGKSSMLVVLGEDHKRLRNLALALVTSTKLKPSYLGDIEKIALHVVGAWRRHDGGGGGGGGGGVRVIAFCEEARKFAFSVIVKQVLGLSPEEPVTARILEDFLAFMKGLISFPLYIPGTPYAKAVQARERISNTVKGIIEERRSAGSCNKGDFLDVLLSSNELSDEEKVSFVLDSLLGGYETTSLLISMVVYFLGQSAQDLDLVKREHDSIRSNKGKEECLTSEDYKKMEYTQQVINEALRCGNIVKFVHRKALKDVKYKEYLIPSGWKVLPVFSAVHLNPSLHGNAQQFQPCRWEGTSQGTSKRFTPFGGGPRLCPGSELAKVEAAFFLHHLVLNYRWRIDGDDIPMAYPYVEFQRGLPIEIEPTSPESGLS

SEQ ID NO: 681 - DNA, 1440 bp, Sorghum bicolor
  misc_feature: Ceres ANNOT ID no.6081804
  misc_feature: Encodes the peptide sequence at SEQ ID NO. 682
atggtgacgactgtgctgctggctgtctttgtagccgccgccgtcctcgccgcggtggtgtaccgccacttcgtgccgctgctccgcaaccccggcgccccaaggggcagcttcggctggcccctcgtcggtgagaccatcggcttcctccgcccccacgcctccaacaccaccggcgacttcttgcacagtcacatcaccaggtacggcgcggtgttcaagtcgcacctgttcggcgcgccgacggtggtgtcgtgcgacgaggagctcaaccagttggtgctgcagaacgaggagcgactgttccagtgcagctacccgggctccatccggggcatcctgggcgcgtcctccctgctggtggtcacgggcgagcgccaccgccggatccgcggcgtgtcgctggcattcgtcgcctccagggggatgcgccccgcccacctcgccgacgtcgaccgggccgcgcgcgccgccatcgcgtcctggcgcggccgctgcggcgccgtcgttgtcttctgcgacgaggcaagacaggtgctgggcttgtccccggaggagccgctcatccgcaggctcctggagcactactccaccttcatgaaagggctcgtcgctctccctctcaacatccctgggacaccgtatgccagagctgtagaggcgaggaggaagatatctctcactttggaagagattatggacgagaggtggaaggaagatgggtcatccaggaagtcatccgctttcctagacgtgctcatcgcaaatagcgagctgtcccacgatgacaaggtcaccttcctgctggactcgcttttagcaggctatgagaccacctccgtcttgctgtccatgctcgtgtatttcatcgggcaatctccccagtgtttgcagcaactcaaggttgagcatgagagcataaggtccagcaaggggacagatgagttcttgaacgctgaagactacaggaagatggaatatacccaacgtgttatcaacgagacgttaagatgcggtaacattgtcaagtttctgcaccggaaggccctcaaggatgtcaaatataaagggtatgtgatcccagctggctggaaagtgctgccaattttgagctccgttcatttggaccctgctctctacaagaaccctcaagagttcgatccttgcagatgggaggggcaggaccaggcgtcgtcaggcaagaagtttgcgccgttcggcggcgggctccggctgtgccccggatcggagctgggcaaactggaggctgccttcttcctgcaccacctcgtgctccagtacaggtggagcttggacggcgaggacgtcccgatggcgcacccgtacgtggagttcagcaagggcctgcccatcaagatatggcgccaccagcaggagtcgtctgatacgacgatcccttggttcgtcgggcagctgtag

SEQ ID NO: 682 - protein, 479 aa, Sorghum bicolor
  misc_feature: Ceres ANNOT ID no.6081804
  misc_feature: Bit score of 917.3 for HMM based on sequences of FIGURE 7.
  misc_feature (184)..(445): Pfam Name: p450 Pfam Description: Cytochrome P450
  misc_feature: Functional Homolog Of Ceres SEEDLINE ID no. ME06336 at SEQ ID NO. 441
MVTTVLLAVFVAAAVLAAVVYRHFVPLLRNPGAPRGSFGWPLVGETIGFLRPHASNTTGDFLHSHITRYGAVFKSHLFGAPTVVSCDEELNQLVLQNEERLFQCSYPGSIRGILGASSLLVVTGERHRRIRGVSLAFVASRGMRPAHLADVDRAARAAIASWRGRCGAVVVFCDEARQVLGLSPEEPLIRRLLEHYSTFMKGLVALPLNIPGTPYARAVEARRKISLTLEEIMDERWKEDGSSRKSSAFLDVLIANSELSHDDKVTFLLDSLLAGYETTSVLLSMLVYFIGQSPQCLQQLKVEHESIRSSKGTDEFLNAEDYRKMEYTQRVINETLRCGNIVKFLHRKALKDVKYKGYVIPAGWKVLPILSSVHLDPALYKNPQEFDPCRWEGQDQASSGKKFAPFGGGLRLCPGSELGKLEAAFFLHHLVLQYRWSLDGEDVPMAHPYVEFSKGLPIKIWRHQQESSDTTIPWFVGQL

SEQ ID NO: 683 - DNA, 1518 bp, Sorghum bicolor
  misc_feature: Ceres ANNOT ID no.6109091
  misc_feature: Encodes the peptide sequence at SEQ ID NO. 684
atgggcgccatgatggcctccataaccagggagctcctcttcttcctccccttcatcctgctggccctcctcgccctgtacaccaccaccgtcgccaaatgccacgccacccaccaccagtggcgccggccgaagaagaagcggccgaacctgcccccgggcgccctcggatggcctttcgtcggcgagaccttcggctacctccgcgcccacccggccacctccgtcggccgcttcatggagcagcacgtcgcacggtacggcaagatataccggtcgagcctgttcggggagcggacggtggtgtcggcggacgcggggctgaaccgctacatcctgcagaacgaggggcggctgttcgagtgcagctacccgcgcagcatcggcggcatcctgggcaagtggtccatgctggtgctggtgggcgacgcgcaccgggagatgcgcgccatctcgctcaacttcctcagctccgtccgcctccgcgccgtgctgctgccggaggtggagcgccacaccctgctggtgctccgctcctggccgccctccgacggcaccttctccgcgcagcaccaagccaagaagttcacgtttaacctgatggcgaagaacataatgagcatggaccccggcgaggaggagacggagcggctgcggctggagtacatcaccttcatgaagggcgtcgtgtcagcgccgctcaacttcccgggcacggcctactggaaggcgctcaagtcacgcgcgtccatacttggagtaatagagaagaagatggaggacaggcttgagaaaatgagcaaggagaactcgagtgtggaggaagatgatcttcttggatgggccctgaagcagtccaatctgtcaaaggaacagatcctggacctcttgctgagcctgctcttcgctgggcacgagacctcgtcaatggcgctggccctcgccatcttcttccttgaaggatgccctaaggctgttcaagaactccgggaagagcatctggagattgctaggagacaaaggcaaagaggggcgtccaaattgagctgggaagactacaaggaaatggttttcacgcaatgtgttataaacgagacattgcggcttggcaacgtggtcaggttcctgcaccggaaggtcatccgagatgtgcactacaatgggtacgacataccacgggggtggaaaatcctgccggttttagcggcagtgcatctggattcgtcgttgtacgaggaccccaaccggttcaacccttggagatggaagagcaacgcgccgagcagtttcatgccgtacggcggcgggccgcggctgtgcgccgggtcggagctggccaagctggagatcgccatcttcctgcaccacctggtgctcaacttccggtgggagctggcggaggcggaccaggccttcgtctaccccttcgtcgacttccccaagggcctgccgatcagggtccagcggatcgccgacgaccaagggcatcgcagcgttttgaccgagagcacaatgtag

SEQ ID NO: 684 - protein, 505 aa, Sorghum bicolor
  misc_feature: Ceres ANNOT ID no.6109091
  misc_feature: Bit score of 940.0 for HMM based on sequences of FIGURE 7.
  misc_feature (284)..(470): Pfam Name: p450 Pfam Description: Cytochrome P450
  misc_feature: Functional Homolog Of Ceres SEEDLINE ID no. ME06336 at SEQ ID NO. 441
MGAMMASITRELLFFLPFILLALLALYTTTVAKCHATHHQWRRPKKKRPNLPPGALGWPFVGETFGYLRAHPATSVGRFMEQHVARYGKIYRSSLFGERTVVSADAGLNRYILQNEGRLFECSYPRSIGGILGKWSMLVLVGDAHREMRAISLNFLSSVRLRAVLLPEVERHTLLVLRSWPPSDGTFSAQHQAKKFTFNLMAKNIMSMDPGEEETERLRLEYITFMKGVVSAPLNFPGTAYWKALKSRASILGVIEKKMEDRLEKMSKENSSVEEDDLLGWALKQSNLSKEQILDLLLSLLFAGHETSSMALALAIFFLEGCPKAVQELREEHLEIARRQRQRGASKLSWEDYKEMVFTQCVINETLRLGNVVRFLHRKVIRDVHYNGYDIPRGWKILPVLAAVHLDSSLYEDPNRFNPWRWKSNAPSSFMPYGGGPRLCAGSELAKLEIAIFLHHLVLNFRWELAEADQAFVYPFVDFPKGLPIRVQRIADDQGHRSVLTESTM

SEQ ID NO: 685 - DNA, 1545 bp, Sorghum bicolor
  misc_feature: Ceres ANNOT ID no.6099094
  misc_feature: Encodes the peptide sequence at SEQ ID NO. 686
atggacgcgggcggttcgccgccactgttcctccttgccgcggcggcgaccgccgtgctggccgccgcggcgctggggtggctgctcctggccggcgggcgggcggccgcggcggggcggcggcggcggtccgcgtcgtcggcgccgcggctgccaccgggcagcacggggctgccgctcatcggggagacgctgcggctcatcgcggcgtacaagacgccgaacccggagccgttcatcgacgagcgcgtgacgcggcacggaacccgggtgttcaccacgcacgtcttcggcgagcgcaccgtcttttccgccgacccggccttcaaccgcctcctgctggcggccgagggccgcgccgtcagctgcagctacccgtcctccatcgccacgctgctcggcccgcgctcgctgctcctcacggcgggtcccgcgcacaagcgcctccactcgctcacgctcacccgcctggggcgtccggcctcgccgccgctgctggcgcacatcgaccgcctcgtcctcgccaccatgagggactggggccgccccggcgccgcccccgtccgcctcctcgacgaggccaagaagatcaccttcaacctcaccgtctggcagctcgtcagcatcgagcccgggccatggaccgagagcgtccgccgcgagtatgtcaagctcatcgacggcttcttctccatccccttccccttcgcctacctcctccctttcaccgtctacggccaggccctcaaggcgaggaagaaggtggccggagctcttcgggaggtgataaggaagaggatggacgagaaggcggagaccggtggcgccagtaagaatggggaggatgaggagaagagggagaagaaggacatggtggaggagcttctcgaagcagagggtgggagcttctccgtggaggagatggtggatttctgcctgtctctgctggtggctggctacgagaccacctccgtgctcatgacgctcgccgtcaagttcctcaccgagacacccgctgcactggcgcagctgaaggaagagcatgacaatatcagaggcataaaaggcaaagaccaacctctggaatggagtgattacaagtcgatgccatttacacaatgtgtgataagtgaaacactgcgcgtggctaacttaattggcggggtgttcaggcgtgcaaacactgatattcactttaaagattacgttattccaaagggctgcaaaatattcgcttcgttccgagctgtgcaccttaatctggaacactatgagaatgctcggaccttcgacccttggagatggcagagcaagaacaagcttcagaatgcagaaggggcaagtctgttcactcccttcggcggcggacctcgcctgtgcccgggctacgagcttgcccgggtggtggtttctgttttcctccaccatctcgtcacatgctttagctgggaagaagctgaggaggacaggattgtcttcttccccaccacccggaccctcaaaggataccccatcaacctgcggcggcgaccggattatgcatga

SEQ ID NO: 686 - protein, 514 aa, Sorghum bicolor
  misc_feature: Ceres ANNOT ID no.6099094
  misc_feature: Bit score of 667.1 for HMM based on sequences of FIGURE 7.
  misc_feature (245)..(509): Pfam Name: p450 Pfam Description: Cytochrome P450
  misc_feature: Functional Homolog Of Ceres SEEDLINE ID no. ME06336 at SEQ ID NO. 441
MDAGGSPPLFLLAAAATAVLAAAALGWLLLAGGRAAAAGRRRRSASSAPRLPPGSTGLPLIGETLRLIAAYKTPNPEPFIDERVTRHGTRVFTTHVFGERTVFSADPAFNRLLLAAEGRAVSCSYPSSIATLLGPRSLLLTAGPAHKRLHSLTLTRLGRPASPPLLAHIDRLVLATMRDWGRPGAAPVRLLDEAKKITFNLTVWQLVSIEPGPWTESVRREYVKLIDGFFSIPFPFAYLLPFTVYGQALKARKKVAGALREVIRKRMDEKAETGGASKNGEDEEKREKKDMVEELLEAEGGSFSVEEMVDFCLSLLVAGYETTSVLMTLAVKFLTETPAALAQLKEEHDNIRGIKGKDQPLEWSDYKSMPFTQCVISETLRVANLIGGVFRRANTDIHFKDYVIPKGCKIFASFRAVHLNLEHYENARTFDPWRWQSKNKLQNAEGASLFTPFGGGPRLCPGYELARVVVSVFLHHLVTCFSWEEAEEDRIVFFPTTRTLKGYPINLRRRPDYA

SEQ ID NO: 687 - DNA, 1578 bp, Sorghum bicolor
  misc_feature: Ceres ANNOT ID no.6071126
  misc_feature: Encodes the peptide sequence at SEQ ID NO. 688
atgtggcccatcatcatcaggggcggttcttggccaccgtcgtccgtcgacgtcggctctgtcacggcggcgctgctcctcgccgccgccgtcatcttcatcccccgtgtctggtcttcatcaagaactagaaggccgcaggtaccggcgagcggcggcagtactgccggaggagcacggctccctgccggctcgctcgggtggccgctcctcggcgagacgctggccttcatccgggctgcgtattctcctcgcccggagtccttcgtcgagaaacgccgcctctggtacggcaaggtgttcaagtcgcacctgtggggttccccggcggtggtgagctcggacccggaggtgagccgcgcggtgctgcaggccgacgcgtcggcgttcgtgccgtggtacccgcggtcgctcatggagctgatggggcagtcgtccatcctggtgctcggcggcggcctccagcgccgggtgcacggcctcgccggcgccttcttcaagtcgccacagctcaaggcgcaggtcaccgccgacatgcagcgccgcgtcggccgcgccatggacgtctggagcaggcgccatcaccggagcatgagcagcaacggctgcggcggcgcaccgcccgtgcgggtacaggacgaggccaagtcgattgtgtttgaaatcctagtgagagcgctgattgggatagaggaaggagacgaaatgcagtacctcaggcaacaatttcaggaattcattgccggtttgatatcacttcctgtcaaacttccagggtgtcaactctatagatccctcagggctaagaagaggatgacaaagttgataaaaatgatcatccaagagaagaggaagaagatgatcgccgaaggcgaggatctgcgtgggactcatccacgtgatatgatcgacgttctgctaggcaatggcaacgacgagctcactgacgagctgatatctgacaacatgatcgacttcatgatccctgcagaggactccgtgccggtgctcattacgttggcagtcaagtatctcagcgaatgcccactagctttgcagcagctcgaggaggagaacatggagctaaagagccagaaatcagacacgggagaaaccctagaatggacagactacatgtcgctcaccttcacacagcacgtgatcacggagacgctgcggatgggcaacatcataaacgggatcatgcggaaggcggtgcgggacgtggaggtgaggggccacctcatccccaagggctggcgcgtcctcgtctacttccgcgccgtccacctcgacgccgccgtccacgacgacccgcacgccttcaacccctggaggtggaaggagagggccgacgtggtaccggtcatgagcagcggcggcggcggcggcttcacccccttcggcggcggccagaggctgtgcccggggctcgacctggcaaggctcgaggcctccatctttctgcaccatctcgtcaccagcttcaggtgggtggcggaggaggacaccgtcgtcaacttccccacggtgcggctcaagcgagggatgccaatcacagtgacgcctagaacctga

SEQ ID NO: 688 - protein, 525 aa, Sorghum bicolor
  misc_feature: Ceres ANNOT ID no.6071126
  misc_feature: Bit score of 776.7 for HMM based on sequences of FIGURE 7.
  misc_feature (371)..(498): Pfam Name: p450 Pfam Description: Cytochrome P450
  misc_feature: Functional Homolog Of Ceres SEEDLINE ID no. ME06336 at SEQ ID NO. 441
MWPIIIRGGSWPPSSVDVGSVTAALLLAAAVIFIPRVWSSSRTRRPQVPASGGSTAGGARLPAGSLGWPLLGETLAFIRAAYSPRPESFVEKRRLWYGKVFKSHLWGSPAVVSSDPEVSRAVLQADASAFVPWYPRSLMELMGQSSILVLGGGLQRRVHGLAGAFFKSPQLKAQVTADMQRRVGRAMDVWSRRHHRSMSSNGCGGAPPVRVQDEAKSIVFEILVRALIGIEEGDEMQYLRQQFQEFIAGLISLPVKLPGCQLYRSLRAKKRMTKLIKMIIQEKRKKMIAEGEDLRGTHPRDMIDVLLGNGNDELTDELISDNMIDFMIPAEDSVPVLITLAVKYLSECPLALQQLEEENMELKSQKSDTGETLEWTDYMSLTFTQHVITETLRMGNIINGIMRKAVRDVEVRGHLIPKGWRVLVYFRAVHLDAAVHDDPHAFNPWRWKERADVVPVMSSGGGGGFTPFGGGQRLCPGLDLARLEASIFLHHLVTSFRWVAEEDTVVNFPTVRLKRGMPITVTPRT

SEQ ID NO: 689 - DNA, 1533 bp, Sorghum bicolor
  misc_feature: Ceres ANNOT ID no.6100227
  misc_feature: Encodes the peptide sequence at SEQ ID NO. 690
atgtcgatcaccaccctgcagcttcttccgtggccgccggagccagcgcgcgccgccgtgctgccgcccctgctgctcgcggcggcggcggcggtcgtcgtctgcctgtgggcgctgctgtcccgcaggctcatcagcagggagcgggccgccggagggaaggagcaggcggtcccggcacggctcccgcctggcagcttcgggtggccggtcgtcggcgagacgctggagttcgtgtcctgcgcctactcctcccgcccggaggccttcgtcgacaagcgccgcctgctgcacgggagcgcggtgttccggtcgcacctgttcggctcggcgacggtggtgacgtcggacgcggaggtgagccggttcgtgctgcagagcgacgcgcgcgccttcgtgccctggtacccgcgctcgctgacggagctcatgggcaagtcctccatcctgctcatcaacggcagcctgcagcggcgcgtgcacggcctcgtcggcgccttcttcaagtcgccgcagctcaaggcgcaggtcaccgccgacatgcagcggcgactcgcgcccgcgctcgacgcctggcgggccagaggccccgccgcgccgccgctccgcatccaggaccacgccaagacgcagatcgtgttcgagatcctggtgaagggtctgatcgggctggaggcaggcccggagatgcagcagctcaagcaccagttccaggaattcattgtcggcctcatgtccctccccatcaagctgccggggactaggctctacaggtccctccaggccaagaagaggatggccaggctgatacaggggatcatacaggagaagaggcggcggcttgacgacggcggcaagggcgagcccggccccccgcgcgacgccatcgacgtgctcataagcggcggcagcgacgagctcaccgacgacctcatctccgacaacatgatcgacctgatgatccccgccgaggactctgtgcccgtgctcatcacgctcgccgtcaagtatctcagcgagtgcccgcttgctctgcaacagctcgaggaggagaacatgcagctcaaaaggcgaaaaaccgacatgggagagaccttgcagtggacagactacatgtcactgtcattcacacaacatgtgataacagagacactgcggatgggcaatatcatcaacggaatcatgcgcaaggcggtgcgggacgttgaggtgaaagggcacctcatccccaaaggttggtgcgtgttcgtgtacttccggtcggtccaccttgacgacaagcgctacgatgagccctacaggttcaatccatggaggtggaaggagaaggacacgagcaccagcagcttcaccccttttggtggtgggcagaggctgtgcccaggcctggatctggccaggctggaagcttccatctttctccatcacttggtgaccagcttcaggtgggtggcggaggaggaccacatcgtcaacttcccaaccgtgcggctgaagcgaggcatgcccatcaggctcaccagcaaagactag

SEQ ID NO: 690 - protein, 510 aa, Sorghum bicolor
  misc_feature: Ceres ANNOT ID no.6100227
  misc_feature: Bit score of 845.8 for HMM based on sequences of FIGURE 7.
  misc_feature (364)..(483): Pfam Name: p450 Pfam Description: Cytochrome P450
  misc_feature: Functional Homolog Of Ceres SEEDLINE ID no. ME06336 at SEQ ID NO. 441
MSITTLQLLPWPPEPARAAVLPPLLLAAAAAVVVCLWALLSRRLISRERAAGGKEQAVPARLPPGSFGWPVVGETLEFVSCAYSSRPEAFVDKRRLLHGSAVFRSHLFGSATVVTSDAEVSRFVLQSDARAFVPWYPRSLTELMGKSSILLINGSLQRRVHGLVGAFFKSPQLKAQVTADMQRRLAPALDAWRARGPAAPPLRIQDHAKTQIVFEILVKGLIGLEAGPEMQQLKHQFQEFIVGLMSLPIKLPGTRLYRSLQAKKRMARLIQGIIQEKRRRLDDGGKGEPGPPRDAIDVLISGGSDELTDDLISDNMIDLMIPAEDSVPVLITLAVKYLSECPLALQQLEEENMQLKRRKTDMGETLQWTDYMSLSFTQHVITETLRMGNIINGIMRKAVRDVEVKGHLIPKGWCVFVYFRSVHLDDKRYDEPYRFNPWRWKEKDTSTSSFTPFGGGQRLCPGLDLARLEASIFLHHLVTSFRWVAEEDHIVNFPTVRLKRGMPIRLTSKD

SEQ ID NO: 691 - DNA, 515 bp, Arabidopsis thaliana
  misc_feature: Ceres SEEDLINE ID no.ME07302
  misc_feature: Expected Sequence
  misc_feature: Encodes the peptide sequence at SEQ ID NO. 693
aatataaaaccataatctctcagttgattaaaaacaccattatctctcaagtcttaatacgaaaaaaatggaatccaagagatcatcatcttctcctctactaattttgattaccaccatcatgatcatattcatcatttctggacctaaatctgtcgatgcagattgcaaacacccggttggaccgtacacggactcatgctttacggattgcgtatctggaaaatatggatataattatgaatccgctttttgtagccgtgacgagaccggaacttgtaaaatatgttgctgcgaacttatcaacgaataggtgcatatgcatttgcatgtttcaatgtatggttggtaacaaaaaaaaaagatgtggagaaagagaacaaattatatacttgtcttccctattttaaagtcaatgcataacccttaaaattattatttacttgcacaatcttgcaatgcttgtaatttaatatatatgacataacaatgtgtatctttgktatgcacattat

SEQ ID NO: 692 - DNA, 658 bp, Arabidopsis thaliana
  misc_feature: Ceres SEEDLINE ID no.ME07302
  misc_feature: Inplanta Sequence
  misc_feature: Encodes the peptide sequence at SEQ ID NO. 693
gggatgacgcacaatcccactatccttcgcaagacccttcctctatataaggaagttcatttcatttggagagaacacgggggactctggcctgcagggccatcaccactgcagtggtacctagaacatcctaatcaaaaaatataaaaccataatctctcagttgattaaaaacaccattatctctcaagtcttaatacgaaaaaaatggaatccaagagatcatcatcttctcctctactaattttgattaccaccatcatgatcatattcatcatttctggacctaaatctgtcgatgcagattgcaaacacccggttggaccgtacacggactcatgctttacggattgcgtatctggaaaatatggatataattatgaatccgctttttgtagccgtgacgagaccggaacttgtaaaatatgttgctgcgaacttatcaacgaataggtgcatatgcatttgcatgtttcaatgtatggttggtaacaaaaaaaaaagatgtggagaaagagaacaaattatatacttgtcttccctattttaaagtcaatgcataacccttaaaattattatttacttgcacaatcttgcaatgcttgtaatttaatatatatgacataacaatgtgtatctttgttatgcacattatgat

SEQ ID NO: 693 - protein, 83 aa, Arabidopsis thaliana
  misc_feature: Ceres SEEDLINE ID no.ME07302
MQIANTRLDRTRTHALRIAYLENMDIIMNPLFVAVTRPELVKYVAANLSTNRCICICMFQCMVGNKKKRCGEREQIIYLSSLF

SEQ ID NO: 694 - protein, 90 aa, Arabidopsis thaliana
  misc_feature: Public GI ID no.91806956
  misc_feature: Functional Homolog Of Ceres SEEDLINE ID no. ME07302 at SEQ ID NO. 693
MQIANTRLDRTRTHALRIAYLENMDIIMNPLFVAVTRPELVKYVAANLSTNRCICICMFQCMVGNKKKKMWRKRTNYILVFPILKAMHNP

SEQ ID NO: 695 - DNA, 1099 bp, Arabidopsis thaliana
  misc_feature: Ceres SEEDLINE ID no.ME08052
  misc_feature: Encodes the peptide sequence at SEQ ID NO. 697
aacacggtgtggtatatgtgttagctttcgtcttcgcctcggtttgggagccacatggatcggggcacagagattccgtgtgatcggggcacagagattccgtcgtaaaaaaatcgtgtcctcgccgacagggaaagccgtgttgcaagaaggggaattccgctgcgagatccgtgaacggttcagagatggcacagacggtgttcaccccctctttggaagcgatgaagcatgtcaaggcagagaacggagtcattctcaccaagcccttccttggatgtctgcaagcaaatattgcctgtcctcgataaatttggagctgctatggcaattgtaaagagtgatatcggcggcaatatcacaagactggaaaacaagtatacttcagaaccatcaaagtatgaacacttgtacagcatgattcaggaagaagttcaaaacaagaccgcaaaaggttcctcaagctgcacaaatgggcttctgtggctgacgagggccatggacttccttgttgagttgtttcgtaacctgcttgagcatccagactgggccatgagtcaatcttgcactgattcatacaccaagactttgaagaaatttcatggctggcttgccagttctagttttacggtggcaatgaagcttgctcctaatagagagaaatttatggaggtcattagtggaaccggtgacatcaatgcagatattgagaaattttgcacgaccttctctcctttcctcaaagaaaaccacaactttctggcgagcgtcggtcttgatgatctgaaggcttcatagatcaatctccatgctgattacaacaaaataagcatgtcttacgaaactcaaagtgttgccgagggtatacctgtttcccgtagccatctcccccttgaaaaactttaggagatggtaataatttgtcagcatgattgaccatggctacttacgcagagaattgacaccactcaacaaatttagttaccgaactctcgatcctgtgttacagcaaatcctatggttatgtggaactctggtgctgtaattctcttgtatgctacccagtatgccgcaggaaatcataattcggtgttccatt

SEQ ID NO: 696 - DNA, 1119 bp, Arabidopsis thaliana
  misc_feature: Ceres SEEDLINE ID no.ME08052
  misc_feature: Inplanta Sequence
  misc_feature: Encodes the peptide sequence at SEQ ID NO. 697
aacacggtgtggtatatgtgttagctttcgtcttcgcctcggtttgggagccacatggatcggggcacagagattccgtgtgatcggggcacagagattccgtcgtaaaaaaatcgtgtcctcgccgacagggaaagccgtgttgcaagaaggggaattccgctgcgagatccgtgaacggttcagagatggcacagacggtgttcaccccctctttggaagcgatgaagcatgtcaaggcagagaacggagtcattctcaccaagcccttccttgatgtctgcaagcaaatattgcctgtcctcgataaatttggagctgctatggcaattgtaaagagtgatatcggcggcaatatcacaagactggaaaacaagtatacttcagaaccatcaaagtatgaacacttgtacagcatgattcaggaagaagttcaaaacaagaccgcaaaaggttcctcaagctgcacaaatgggcttctgtggctgacgagggccatggacttccttgttgagttgtttcgtaacctgcttgagcatccagactgggccatgagtcaatcttgcactgattcatacaccaagactttgaagaaatttcatggctggcttgccagttctagttttacggtggcaatgaagcttgctcctaatagagagaaatttatggaggtcattagtggaaccggtgacatcaatgcagatattgagaaattttgcacgaccttctctcctttcctcaaagaaaaccacaactttctggcgagcgtcggtcttgatgatctgaaggcttcatagatcaatctccatgctgattacaacaaaataagcatgtcttacgaaactcaaagtgttgccgagggtatacctgtttcccgtagccatctcccccttgaaaaactttaggagatggtaataatttgtcagcatgattgaccatggctacttacgcagagaattgacaccactcaacaaatttagttaccgaactctcgatcctgtgttacagcaaatcctatggttatgtggaactctggtgctgtaattctcttgtatgctacccagtatgccgcaggaaatcataattcggtgttccattacaaaaaaaaaaaaaaaaaaa

SEQ ID NO: 697 - protein, 202 aa, Arabidopsis thaliana
  misc_feature: Ceres SEEDLINE ID no.ME08052
  misc_feature: Bit score of 556.1 for HMM based on sequences of FIGURE 13.
  misc_feature (10)..(198): Pfam Name: GLTP Pfam Description: Glycolipid transfer protein (GLTP)
MAQTVFTPSLEAMKHVKAENGVILTKPFLDVCKQILPVLDKFGAAMAIVKSDIGGNITRLENKYTSEPSKYEHLYSMIQEEVQNKTAKGSSSCTNGLLWLTRAMDFLVELFRNLLEHPDWAMSQSCTDSYTKTLKKFHGWLASSSFTVAMKLAPNREKFMEVISGTGDINADIEKFCTTFSPFLKENHNFLASVGLDDLKAS

SEQ ID NO: 698 - DNA, 984 bp, Zea mays
  misc_feature: Ceres CLONE ID no.1556477
  misc_feature: Encodes the peptide sequence at SEQ ID NO. 699
aggaggacctgccaaacgggcctctgctccagctaaccgcctgcctgccttttcttctctcgtccaccctaggtctcagtctctgtctctgtctctgctcgcgctcttgtggagctactaggtgaccgtcgcggccgccctacgccacgtgctcgatccagcctcgtcggcttcttcgcacccgtcaccggcggtcagcacccaccaggttcatagatggcagagacggtgttcaccccctctttggaagggatgaagcatgtgaaggcggagaacggagtcattctcaccaagcccttccttgatgtctgcaagcaaatcttgcctgtcctggataaatttggagctgctatggcaattgtaaagaatgatatcagcggcaatatcacaaggctggaaaacaagtattcttcagatccatcgaagtatggacacttgtacagcatggttcaggaagaagttcaaaacaagaccgcgaaaggttcctcaagctgcacaaatggtcttctgtggctcacgagggccatggatttccttgttgagttgttccgtaacctgcttgagcatccagactggaccatgactcaagcttgcactgattcatacaccaagaccctcaagaaatttcatggctggcttgccagttctagttttacggtggccatgaagctctctcctaatagagataaatttatggaggtcattagtggaactggtgatatcaatgcagatatggagaaattttgcacaaccttctctccttttctcaaagaaaatcacgagtttctggcgagcgttggtcttgatgatatgaaggcttcgtagagcgatctccaaggtggtgattacaacaaaataagcgtgtcttatcaaactcaagtgttgcagaggatatacctgttttctgtagccatctccccattgaaaattatacagggtgataataatttttccgcatgattaaccatggctacttacacagct

SEQ ID NO: 699 - protein, 202 aa, Zea mays
  misc_feature: Ceres CLONE ID no.1556477
  misc_feature: Bit score of 548.5 for HMM based on sequences of FIGURE 13.
  misc_feature (10)..(198): Pfam Name: GLTP Pfam Description: Glycolipid transfer protein (GLTP)
  misc_feature: Functional Homolog Of Ceres SEEDLINE ID no. ME08052 at SEQ ID NO. 697
MAETVFTPSLEGMKHVKAENGVILTKPFLDVCKQILPVLDKFGAAMAIVKNDISGNITRLENKYSSDPSKYGHLYSMVQEEVQNKTAKGSSSCTNGLLWLTRAMDFLVELFRNLLEHPDWTMTQACTDSYTKTLKKFHGWLASSSFTVAMKLSPNRDKFMEVISGTGDINADMEKFCTTFSPFLKENHEFLASVGLDDMKAS

SEQ ID NO: 700 - DNA, 900 bp, Arabidopsis thaliana
  misc_feature (1)..(900): Ceres Promoter PD2999
  misc_feature (1)..(900): Ceres Promoter PD2258
atagatttatcaaagccaactcatgacggctagggttttccgtcaccttttcgatcatcaagagagtttttttataaaaaaatttatacaattatacaatttcttaaccaaacaacacataattataagctatttaacatttcaaattgaaaaaaaaaatgtatgagaattttgtggatccatttttgtaattctttgttgggtaaattcacaaccaaaaaaatagaaaggcccaaaacgcgtaagggcaaattagtaaaagtagaaccacaaagagaaagcgaaaaccctagacacctcgtagctataagtaccctcgagtcgaccaggattagggtgcgctctcatatttctcacattttcgtagccgcaagactcctttcagattcttacttgcaggttagatattttctctctttagtgtctccgatcttcatcttcttatgattattgtagctgtttagggtttagattcttagttttagctctatattgactgtgattatcgcttattctttgctgttgttatactgcttttgattctctagctttagatccgtttactcgtcgatcaatattgttcctattgagtctgatgtataatcctctgattaattgatagcgtttagttttgatatcgtcttcgcatgttttttatcatgtcgatctgtatctgctctggttatagttgattctgatgtatttggttggtgatgttccttagatttgatatacctgttgtctcgtggtttgatatgatagctcaactggtgatatgtggttttgtttcagtggatctgtgtttgattatattgttgacgttttggttgttgtatagttgatggttgatgtatttttgttgattctgatgtttcgatttttgtttttgttttgacagct

SEQ ID NO: 701 - DNA, 1300 bp, Oryza sativa
  misc_feature (1)..(1300): Ceres Promoter PD3141
tagctcacatcatcaaaagcaatggttggtgatgtggagaaaaaattttctatagcaagagaaaaaaaaacacactaaaatccggaaaaacaaaatgagaaagtagtggaggtggagagatgtttggtgaggcgggcgtgggccccacccaacatggggttggtggccactggccacggccacggggggttggtggacgcgggggcgtgggccccacctccccagcgtctgtccgtccggcgggtgagaaaagtttcgggcggggtcagcgacggttcactggctgtgtgtgcggtcctcacgtgctcaccccccggggagaaatacttttcgcacgcgaatcctacccgcacccacggtggggtgggccccactccactcccccgcgcgtcgtctcctacctcccgatccgcacccgacgcgcgctataaataggaggcgcgagcgcattccggaggccacccccgtgcagaatcacacacgccggactctccccttctctctgtctcgctccttcgttcgctcgctttatcccccccgaataaaggcgagaagccgcagcggcggacgaagaaggtgagctctctcgtctcgcctcgtcttcttcttgctcgtgagatcctcactcctctcggggatttttttttctctgttggggtttgggtttgggggtagatctgggttgggcgctcttcgatctgaggagcgcgaggtttggtggattggagatctggggactaggggttagtgattgtttgtttgtttcgtttttcggtcgcggaagtgggaggggaaagcggttggggggatattcttgctttttttgtttaatctttgattgtgcgtgtatggagttctggattagcagaaaaaagggtccgatcttttttggtttatgggggagaacaggctaggctagatctagcgttggtggatccaattttaaattgcaaaattttgtcagtacttagctgtcggctgcagtagatctgaagaatggatctctgttttgtgattaattttctctgttttttttcctttttttgttctgtggtctactacaccaatagagaattcgaatttgctctcctctttctttcagcaagtaggagtaaaatcacttagtactagtatcattttaggtgcaaaaatcgactctttttctcttggatacaccagttcgtcctcatcttggctgcaacgaatgaatggattgatcatctttagaaactgtctgcacaaaatcgagtatttttttttctgatggcttgcaaccgatgcatgcagagggcagatagaa

SEQ ID NO: 702 - DNA, 972 bp, Zea mays
  misc_feature: Ceres CLONE ID no.236892
  misc_feature: Encodes the peptide sequence at SEQ ID NO. 703
gggcctctgctccagctaaccgcctgcctgccttttcttctctcgtccaccctaggtctcagtctctgctcgcgctcttgtggagctactaggtgaccgtcgcggacgccctacgccacgtggtcgatccagcctcgtcggcttcttcgcacccgtcaccggcggtcagcacccaccaggttcatagatggcagagacggtgttcaccccctctttggaagggatgaagcatgtgaaggcagagaacggagtcattctcaccaagcccttccttgatgtctgcaagcatatcttgcctgtcctggataaatttggagctgctatggcaattgtaaagaatgatatcagcggcaatatcacaaggctggaaaacaagtattcttcagatccatcaaagtatggacacttgtacagcatggttcaggaagaagttcaaaacaagaccgcgaaaggttcctcaagctgcacaaatggtcttctgtggctcacgagggccatggatttccttgttgagttgttccgtaacctgcttgagcatccagactggaccatgactcaagcttgcactgattcatacaccaagaccctgaagaaatttcatggctggcttgccagttctagttttacggtggccatgaagctctctcctaatagagataaattcatggaggtcattagtggaactggtgatatcaatgcagatatggagaaattttgcacaaccttctctccttttctcaaagaaaatcacgagtttctggcgagcgttggtcttgatgatatgaaggcttcgtagagcgatctccaaggtggtgattacaacaaaataagcgtgtcttatcaaactcaagtgttgcagaggatatacctgttttctgtagccatctccccattgaaaattatacagggtgataataatttttccgcatgattgaccatggctacttacacactgacttgacagtactctac

SEQ ID NO: 703 - protein, 202 aa, Zea mays
  misc_feature: Ceres CLONE ID no.236892
  misc_feature: Bit score of 548.1 for HMM based on sequences of FIGURE 13.
  misc_feature (10)..(198): Pfam Name: GLTP Pfam Description: Glycolipid transfer protein (GLTP)
  misc_feature: Functional Homolog Of Ceres SEEDLINE ID no. ME08052 at SEQ ID NO. 697
MAETVFTPSLEGMKHVKAENGVILTKPFLDVCKHILPVLDKFGAAMAIVKNDISGNITRLENKYSSDPSKYGHLYSMVQEEVQNKTAKGSSSCTNGLLWLTRAMDFLVELFRNLLEHPDWTMTQACTDSYTKTLKKFHGWLASSSFTVAMKLSPNRDKFMEVISGTGDINADMEKFCTTFSPFLKENHEFLASVGLDDMKAS

SEQ ID NO: 704 - DNA, 1000 bp, Arabidopsis thaliana
  misc_feature (1)..(1000): Ceres Promoter YP2680
gtctaccgacttttccaccgtccatccttcgacgatggttctttctaaatgaccttctcagttttttcctgtcatgcgtattattattattagttaataaggctccactactactcggaaagtccgagtacaaataatatgacaataatgtcaaacttattcttagtattggtttaaaagaaggattcaacaagagtacttaatcacgtctcataattaccactttcatccaaacatggtcattactatatgacatgatcgtgttacattaatttggaaagtagtatatgtctttttcctaaaagtttatgtttagatttttgatcactaagaatataatgtcatatatattattaacctttacacctaaatgttatattaattacttgaatgataaaacggaaaatatcgaaagtttaggctaggtctctctagcatctctagtgtatttatttagcaatcccaaaacaaaattgtgttttctacaattttagtattagattaccaaaattgttgtatatagtctggtgattccgttttgatggtcgagatcgaaagaagcaagcatccactatgtggtcgtcacatgcgaatatttctaagtatacaaccatctatcgaaagtttcgaaacaacccaaatataatagtaataaattctgagaattctcctattttttattgatatgaaaaaagcagtaaaatattatgtaaagtagagaggaaccaaaattaaaacgtgcagatttattaaaagaataaagtgggatccaaaaagtcagcgtgaaacatgtgatacgatataacgacacggtcctatgactaagtccactccaatccagtgacgtaaacagcaccatcacccatagcttcctgtgacgcacatccttacgtaaccatcgttgacgctagactttcctctctgatctctctttcttcatgtatatataacaaaaccttcctttcctaattggtatctatctttaaaaacatacttgaaa

SEQ ID NO: 705 - DNA, 1000 bp, Arabidopsis thaliana
  misc_feature (1)..(1000): Ceres Promoter PD3147
  misc_feature (1)..(1000): Ceres Promoter YP2663
agtaatggtttacacattgattattctataagaaacatctagaaaagaaaaaaaaggaaaaaaaacatctagaaatatatcagaacttctttcacaaaagaataatatatatcagaactgcgtgttattaattcaacgagttcaaacttcaaagtatgatgtggtaacacaaccaaattctcctctcggatataattagaccaaaaaaaaaaagacgaaatatttttgctataaacaatatatatatgggtaaatgtgaagaaatttgtttcttctgccaggaaatagacagttaatacattgaaaaaatggtaaaactttaaagaaaagcatatcttaagagatgaaaccctaattaaggtgttgagacttcagagacagatcaagagatcttatcagaagatatctgtgaagcatttcaaacaaacattacaaaaaatgtagcctccttccggcggaatggtagaaggagttgtaattctgctaatgtttattttggtcatatatagatttaattctttgatattgcaaactcatgatcccattttcttattatgtggttaaccaataaaagactcaattttgcagtcttactaatcaggactatttgccaaaaaaaaaactaatcaggactaaaaaactacatctctttttttttttgctacatatatatatatatatgattattttcagtgtatatataatatgtatagatattaaaaataaataaaagataagtcgtgtgtagtccacatatcttgaacatcaaaatgacaaaactattaaaatccgcggcaaaatctcttatccagtgacatgttacttatcaaccaatcacaacacgccacctcatcaccccaagaccacttctcttatcttcctctccctccactaatcccctcaagaatctaaagctcctcccataagtcttctctccacacttcacccaaaactccagaaccctagaattcgaaatctccaaagaacccgacaaagcgcc

SEQ ID NO: 706 - protein, 202 aa, Oryza sativa subsp. japonica
  misc_feature: Public GI ID no.115447377
  misc_feature: Bit score of 561.2 for HMM based on sequences of FIGURE 13.
  misc_feature (10)..(198): Pfam Name: GLTP Pfam Description: Glycolipid transfer protein (GLTP)
  misc_feature: Functional Homolog Of Ceres SEEDLINE ID no. ME08052 at SEQ ID NO. 697
MAETVFTPSLEGMKHVKSESSVILTKPFLDVCKQILPVLDKFGAAMALVKSDIGGNITRLENKYSSDPSKYEQLYSMVQEEVQNKTAKGSSSCTNGLLWLTRAMDFLVELFRNLLEHQDWTMSQACTDSYTKTLKKWHGWLASSSFTVAMKLAPNREKFMEVISGTGDIKADIEKFCTTFYPFLKENHDFLASVGLDDLKAS

SEQ ID NO: 707 - protein, 202 aa, Zea mays
  misc_feature: CERES CLONE ID no.100877993
  misc_feature: Bit score of 503.3 for HMM based on sequences of FIGURE 13.
  misc_feature (10)..(198): Pfam Name: GLTP Pfam Description: Glycolipid transfer protein (GLTP)
  misc_feature: Functional Homolog Of Ceres SEEDLINE ID no. ME08052 at SEQ ID NO. 697
  misc_feature (161)..(161): Xaa is any aa, unknown, or other
  misc_feature (166)..(166): Xaa is any aa, unknown, or other
  misc_feature (167)..(167): Xaa is any aa, unknown, or other
  misc_feature (178)..(178): Xaa is any aa, unknown, or other
  misc_feature (179)..(179): Xaa is any aa, unknown, or other
  misc_feature (180)..(180): Xaa is any aa, unknown, or other
  misc_feature (181)..(181): Xaa is any aa, unknown, or other
  misc_feature (188)..(188): Xaa is any aa, unknown, or other
  misc_feature (191)..(191): Xaa is any aa, unknown, or other
  misc_feature (192)..(192): Xaa is any aa, unknown, or other
  misc_feature (193)..(193): Xaa is any aa, unknown, or other
  misc_feature (196)..(196): Xaa is any aa, unknown, or other
  misc_feature (198)..(198): Xaa is any aa, unknown, or other
  misc_feature (199)..(199): Xaa is any aa, unknown, or other
MAQTVFTPSLEAMKHVKAENGVILTKPFLDVCKQILPVLDKFGGAMAIVKSDIGGNITRLENKYTSEPSKYEHLYSMVQEEVQNKTAKGSSSCTNGLLWLTRAMDFLVELFRNLLEHPDWTMGQSCTDSYTKTLKKFHGWLASSSFTVAMKLAPNREKFMXVISGXXDINADIEKFCXXXXPFLKENXNFXXXVGXDXXKAS

SEQ ID NO: 708 - DNA, 1190 bp, Triticum aestivum
  misc_feature: Ceres CLONE ID no.696883
  misc_feature: Encodes the peptide sequence at SEQ ID NO. 709
aaaaacagatcagtccggggtcgtggcctccactcggcatcttcttcctcccccacatcgcacttcctcccctgctagattcgtccctccaccgaccggcaaggcctctctcctgcacttccctcgcccaaggttgcaccagagaaggcggaaaacatcacagtttgcgaaatcgtggagcggtagagagagatggccgagacggtgttcgctccgtgtttggaagggatgaagcatgtcaggtcggacagcggggtcatgctcgccaagcccttccttgatgtctgcaagcaaatcttgcctgtcctggataaatttggtgctgctatggcaattgtgaagagtgatattggaggtaatatcacgaggttggagaacaagtattcttcagacccgtcaaaatatgagcacttgtacaccatggtccaagaagaagttgaaaagaagaccgcaaagggttcatcaagctgcacaaatggacttctatggctcacgagggctatggacttccttgttgaactgttccgtaatctacttgaccatccagactggactatgagtcaagcatgtactgattcatacacaaaaactctgaagaaatggcatgggtggctcgccagttccagttttacggtggctatgaagcttgctcctaacaaagataaatttatggaggtaattagcggaacgggtgatatcaaagcagacattgagaaattctgcaccaccttttatccctttctcaaggagaatcatgacttcctggccagtgttgggctcgatgatatgaaggcttcttaatgcaatacacaccgacaatcatcacaaatatgaagtgctgctattttctcgaattttattgtggccaaggatacactgttttgcatactgatcttcaggaaattatagacgaataataagtcaaaatgtttgggtgttcatgacccatagctacttacatacaagatgaattgaatgtatgcatgggatcaaaattaacttttgaaagtcaccttgtcagccaagccggccattttaccaattgatgtaactgaagagaacgcagaggatgcagatatgtggtgatcttgtcgttcagtttataaactgctgtgtaagtgattctgtttataaactgctgtataagtgatgaggcgaagatgcaaattaagagtctgttattgatgcat

SEQ ID NO: 709 - protein, 202 aa, Triticum aestivum
  misc_feature: Ceres CLONE ID no.696883
  misc_feature: Bit score of 557.7 for HMM based on sequences of FIGURE 13.
  misc_feature (10)..(198): Pfam Name: GLTP Pfam Description: Glycolipid transfer protein (GLTP)
  misc_feature: Functional Homolog Of Ceres SEEDLINE ID no. ME08052 at SEQ ID NO. 697
MAETVFAPCLEGMKHVRSDSGVMLAKPFLDVCKQILPVLDKFGAAMAIVKSDIGGNITRLENKYSSDPSKYEHLYTMVQEEVEKKTAKGSSSCTNGLLWLTRAMDFLVELFRNLLDHPDWTMSQACTDSYTKTLKKWHGWLASSSFTVAMKLAPNKDKFMEVISGTGDIKADIEKFCTTFYPFLKENHDFLASVGLDDMKAS

SEQ ID NO: 710 - DNA, 624 bp, Populus balsamifera subsp. trichocarpa
  misc_feature: Ceres ANNOT ID no.1462901
  misc_feature: Encodes the peptide sequence at SEQ ID NO. 711
atggaggcttcagctggtcaaggaactgtttttgcaccatcgttggaaggaatgaagcatgtcagatctgataacggagaaatactcactaaacctttcttggacgtctgcaaattgattttgcctgttattgataagtttggagctgctatggcccttgtaaaatctgatatcggtggtaacataacaagattggaaaccaaatatctgtcagatccatctaaatacaaccaattttacactatggttcaagaggaggctgatgctaaaacagcaaaaggatcatcaagttgtgccaatggtcttctttggctgaccagagcaatggatttcctggtggaacttttccggaatttacttacacatccagattggacaatgtcacaagcctgtacagattcctatggcaagacactgaaaaaatttcatggctggcttgccagttcaagtttcactattgccatgaagcttgctccagataggaagaagttcatggaagtaatagctggcacaggcgatgttgctgctgacatggaggaattttgtacaacctttcctccatttcttgaagagaatcacaagttcctggctagtgttggtctggatgatatgaaagcttcataa

SEQ ID NO: 711 - protein, 207 aa, Populus balsamifera subsp. trichocarpa
  misc_feature: Ceres ANNOT ID no.1462901
  misc_feature: Bit score of 550.7 for HMM based on sequences of FIGURE 13.
  misc_feature (15)..(203): Pfam Name: GLTP Pfam Description: Glycolipid transfer protein (GLTP)
  misc_feature: Functional Homolog Of Ceres SEEDLINE ID no. ME08052 at SEQ ID NO. 697
MEASAGQGTVFAPSLEGMKHVRSDNGEILTKPFLDVCKLILPVIDKFGAAMALVKSDIGGNITRLETKYLSDPSKYNQFYTMVQEEADAKTAKGSSSCANGLLWLTRAMDFLVELFRNLLTHPDWTMSQACTDSYGKTLKKFHGWLASSSFTIAMKLAPDRKKFMEVIAGTGDVAADMEEFCTTFPPFLEENHKFLASVGLDDMKAS

SEQ ID NO: 712 - protein, 202 aa, Oryza sativa subsp. japonica
  misc_feature: Public GI ID no.22296432
  misc_feature: Bit score of 497.8 for HMM based on sequences of FIGURE 13.
  misc_feature (10)..(198): Pfam Name: GLTP Pfam Description: Glycolipid transfer protein (GLTP)
  misc_feature: Functional Homolog Of Ceres SEEDLINE ID no. ME08052 at SEQ ID NO. 697
MEGTVFTPSLQGIKNVKSESGVILTKPFLEVCKHILPVLDKFGSAMSIVKNDIGGNITRLETKYASDPSKYEQLHSMVKVEISSKTAKSSSSCTNGLLWLTRAMDFLVALFHNLVQHPDWQMSQACSDAYSKTLKKWHGWLASSSFSVAIKLAPDRKKFMEIISGSGDINADIEKFCATFSPLLAENHRFLASVGMDDLKAS

SEQ ID NO: 713 - DNA, 962 bp, Gossypium hirsutum
  misc_feature: Ceres CLONE ID no.1794111
  misc_feature: Encodes the peptide sequence at SEQ ID NO. 714
gttttcagcttcagtgtcacttcaattcagtttctctctcgtcttcaatatttcaaccgaatccaattctcaaagaaaaaaaatcgccagttaagagagaaaaaaaaagttgaaatcttttttgagcaatggaaggatcagtttttactccatcattggaaggaatgaagcatatcaaatctccagaaggggaaatgcttaccaagccttttttggatgtctgcaagttgattttgccagtcctcgataagttcggatctgctatgagccttgtgaagagtgatgttggtggtaacatatcgaggttggaaaagaaatatgaaactgatcccgctaaatacaatcacttgtacagtatggtgaaagaagaggttgattgtaaaacagcaacagattcatctagttgtaccaatggtcttctctggttgacacgagcaatggatttcctcgtagaattgttccgcaacttacttgcacatccagattggactatgactgaatcttgtaccgactcctatggcaaaaccctgaaaaagttccatggctggattgctagttccgctttcacggttgcattgaagttggctccagataggaagaagttcatggaagtgatagctgggactggagatgttaatgctgacatggagaaattttgttcgactttccccccatttcttgaggagaatcacaaatatctggccaagtttggcttggatgatatgaaggcatgatggaataagtttaatgagtagaggagagactacctacctatatttactcccgtgttcgaacttccagtatcttgcttccggcttaaaccttcgtatttacttgaaataattaatgagtaatgactttaaacacatactcttgaatgcttagtttttagtaatttttggttaaatgtcttgacccttgaatgatattattgaaattatgttcagttcttctccctagtt

SEQ ID NO: 714 - protein, 201 aa, Gossypium hirsutum
  misc_feature: Ceres CLONE ID no.1794111
  misc_feature: Bit score of 537.4 for HMM based on sequences of FIGURE 13.
  misc_feature (10)..(198): Pfam Name: GLTP Pfam Description: Glycolipid transfer protein (GLTP)
  misc_feature: Functional Homolog Of Ceres SEEDLINE ID no. ME08052 at SEQ ID NO. 697
MEGSVFTPSLEGMKHIKSPEGEMLTKPFLDVCKLILPVLDKFGSAMSLVKSDVGGNISRLEKKYETDPAKYNHLYSMVKEEVDCKTATDSSSCTNGLLWLTRAMDFLVELFRNLLAHPDWTMTESCTDSYGKTLKKFHGWIASSAFTVALKLAPDRKKFMEVIAGTGDVNADMEKFCSTFPPFLEENHKYLAKFGLDDMKA

SEQ ID NO: 715 - DNA, 1000 bp, Arabidopsis thaliana
  misc_feature (1)..(1000): Ceres Promoter PD3006
  misc_feature (1)..(1000): Ceres Promoter YP0050
gtacttgagggaaacatcatatttttaaaccttgtctcagtaagctaacacacaccccttgtgattacttatccatgtttatccacaagaatgcagttggattgagatattttcttctttgttgaaatcaggcctcaaggtgttcatgtggtctgcaaaaaaattcccaaaaataaagatagtgacatctgaaatcgataatggattagacgaagagtttcgtgttattccttggtatgggcgggtttggggacagatattttggcacagacgaggactaggccactgtggtcctgcagcattaggtgtcccttccatgtcctgcattacattttattgatggattcatcaccctatctactacaacggctacacaaactatgaagagttttgtttactaataaatgcccaagtgaggggtcgatcgaacccgggacacgtttttcagtttaccatatagaattatccttggaacccttgatactccataaaacatcaccacctctgttgtcatctcatgaatccaggttcaaacctagtctctctctccctagtgggaggtatatggccactgggccaatgatgacaaaatgcaaaaaaaataaaatacatttgggttcattatctaaaatatctcttgtgtttgtaagttttggttgcacactcgtgtggttgaagtgtgtgtgagaggtactatacaatacactctgcttttgttttgtacctatctctttctcttctccacatatccaagactttggggataaagctgagatcattggttgccatttggttgtgtagaagcaatcacccatttgctttatccgaggttgataaatttcctcgggttctccttctgacacgtatgacaaattctaatagtatattcctcgtagatattacctatatattctcaatagttgcaggtacttaaggctttgtcttggcatcctcgtcctcttcagcaaaactcgtctctcttgcactccaaaaagcaacc

SEQ ID NO: 716 - DNA, 1000 bp, Arabidopsis thaliana
  misc_feature (1)..(1000): Ceres Promoter PT0822
ccaccaacatacattagaatctaatgtaattacatcatcaatcatagacctaatgaatatttaataccacacagtttaaacattgctattaaagtttgaaaagattatactttagtaaaataatgttttcaaacttgtattcaattatactacgtaagcagtgatccaattattacgaacataatacttttccaaatcaaaattttgtttttgttcaccttaccatcagtttcataatagaaatattatatatatacaacacaaacaaatgaatgagaaatgtttttctattattatgacttttatttaagattcaaaagaacgaagaagagttatatatatgcttgtttgtttcaggacaaatacaataaataagtggataagaaaaccacaaaccttgaactagcctgaaatgtgtgaaccaagctatacaaactgtacgtgattctgcatcgtggaagtcacaaacagacttctgacttctgctaaagataaaactcactgtttgcaagcaatttagtataaatatgaagcattgacctaccaagatcgacacaatcacacagtttcttcttaattaaacctagctatttttgtctttagcagaagtcagaaagctagttttgtatttttcttatttcttaaatatatggcggccaatgttatgagacggtttatgatttaaagatacacaatggacccacgacgttgccataatacaattattaggctgttaattaacgtgatcgttacgtttgctacaaactagctagttgtgtcttctttattttagtagataagtataagagtctaaaaatattacaacccaataatggttacattcatggtcgacttagaagatgaaagttgatttcttaaaaaaaaaacacgcacaataaataaaccaccaattcacaaatacaagaaatttaataacctcgagcagttaccctatttaaatcccctctagccttgttttccttctcacacctatgaagca

SEQ ID NO: 717 - DNA, 1050 bp, Glycine max
  misc_feature: Ceres CLONE ID no.1240524
  misc_feature: Encodes the peptide sequence at SEQ ID NO. 718
agaaagaaaagcgagagtaacttcgaatctgattttcatcccttaacaccaacgccaacgccaattccattcagatcacagtcccttcgattcctgctgcaacatactttcaaagccctaaaatggaggggactgtcttcactcctgcactgcaagaaattgagcatgtaaagtctgatcaaggagaaattctgagcaagcctttcttggatgcgtgcaaacacatattgcctgtaatagataagtttggagctgctatggcccttgttaaatctgacataggtggtaacatatcgagattggaaactatgtattcttccaatccaaccagatttaactacctgtacagtttggtacaggtagaggttaaaactaaaacagctaaatcatcatccagttgtaccaatggacttctttggctcacaagagcaatggatttcttggtggctttgttccgaaacttaatcgagcatgaagattggccaatgtcacaagcatgtacagattcgtataacaagactctgaagaagtggcatggctggcttgctagttcaagcttcacagtagtcatgaagcttgctcctgataggaagaagtttatggacgtgataggaggcactggcaatatcagtgctgacattgagaaattttgtacaaccttttctcctctccttgaagagaatcacaagtttttggctcgatttggcttagatgatatgaaggcatcatgaatcacagattcagaagttcccgatgagtagctcttgcatgctcacacccatttcatatctactttactagcatgataaataagcatcgactttcatattgtgcctctaagtactctattaagaacagtgtttctatggtatctcaaaatttgttacagttagtttattatgaaggttaatgctagtggagtttagtatcttcttgatgatttaccgattggctagaaccaaactcatccaactttggttcagtatatggatggctgcttggttgtataagtctgattcaattataaaatttataacaactgtttttatg

SEQ ID NO: 718 - protein, 202 aa, Glycine max
  misc_feature: Ceres CLONE ID no.1240524
  misc_feature: Bit score of 545.7 for HMM based on sequences of FIGURE 13.
  misc_feature (10)..(198): Pfam Name: GLTP Pfam Description: Glycolipid transfer protein (GLTP)
  misc_feature: Functional Homolog Of Ceres SEEDLINE ID no. ME08052 at SEQ ID NO. 697
MEGTVFTPALQEIEHVKSDQGEILSKPFLDACKHILPVIDKFGAAMALVKSDIGGNISRLETMYSSNPTRFNYLYSLVQVEVKTKTAKSSSSCTNGLLWLTRAMDFLVALFRNLIEHEDWPMSQACTDSYNKTLKKWHGWLASSSFTVVMKLAPDRKKFMDVIGGTGNISADIEKFCTTFSPLLEENHKFLARFGLDDMKAS

SEQ ID NO: 719 - DNA, 1102 bp, Glycine max
  misc_feature: Ceres CLONE ID no.539525
  misc_feature: Encodes the peptide sequence at SEQ ID NO. 720
  misc_feature (856)..(856): n is a, c, t, g, unknown, or other
aaatctgattttcattcctcaacgccaacgccaacgccaacgccaattccattcagatcacagtcccttcaattcctgctgcagcatactgtgtgcaacaaagccctaaaatggaggggactgtcttcactcctgcactgcaagaaattgagcatgtaaagtctgatcaaggagaaattctgagcaagcctttcttggatgcgtgcaagcacatattgcctgtaatagataagtttggagctgctatggcccttgttaaatctgacataggtggtaacatatcgagattggaaactatgtattcttccaatccatccagatttaactacctgtacagtttggtacaggtagaggttgaaactaaaacagctaaatcatcatccagttgtaccaatggacttctttggctgacaagagcaatggatttcttggtggctttgttccgaaacttaatcgagcatgaagattggccaatgtcacaagcatgtacagattcgtataacaagactctgaagaagtggcatggttggcttgctagttcaagcttcacggttgtcatgaagcttgctcctgataggaagaagtttatgaacgtgataggaggcactggcgatatcaatgctgatatcgagaaattttgtacaaccttttytcctytccttcaagagattcacaagtttttggctcgatttcgcttagatgatatgaaggcatcatgaatcacagattcagaagttcctgacgagtagctcttgcatgctcactytcatttcatatcaactttattagcatgataaataagcattggctttcatgttgtgccgttaagtactctattaacatcatgtagtgtttntatgtcaatttgttactatcagttggttgtttattatgaaggttaaggctaatggagtttagtaacttgttttytgcaataccgtatagagtatyttggtgattataragtactaattgactagaatcaaactcatcaaactttggcycaacatatggatggctgcttggtcatataaatyttattcaattataaaacttactactgtttatgaaagtgatgaaaratgtgatctgcattctctyt

SEQ ID NO: 720 - protein, 202 aa, Glycine max
  misc_feature: Ceres CLONE ID no.539525
  misc_feature: Bit score of 531.8 for HMM based on sequences of FIGURE 13.
  misc_feature (10)..(198): Pfam Name: GLTP Pfam Description: Glycolipid transfer protein (GLTP)
  misc_feature: Functional Homolog Of Ceres SEEDLINE ID no. ME08052 at SEQ ID NO. 697
  misc_feature (181)..(181): Xaa is any aa, unknown, or other
  misc_feature (183)..(183): Xaa is any aa, unknown, or other
MEGTVFTPALQEIEHVKSDQGEILSKPFLDACKHILPVIDKFGAAMALVKSDIGGNISRLETMYSSNPSRFNYLYSLVQVEVETKTAKSSSSCTNGLLWLTRAMDFLVALFRNLIEHEDWPMSQACTDSYNKTLKKWHGWLASSSFTVVMKLAPDRKKFMNVIGGTGDINADIEKFCTTFXPXLQEIHKFLARFRLDDMKAS

SEQ ID NO: 721 - DNA, 997 bp, Glycine max
  misc_feature: Ceres CLONE ID no.520979
  misc_feature: Encodes the peptide sequence at SEQ ID NO. 722
aaaaaccaataacaaaaaactacttgtaaattttttgtgatacgtctacctgttgttgttctcagtctaagatcaccgaggctttccttgttcaatcaaaacacaaaaatggaggggactgttttcactcctgcacttgaaggaattaagcttgtaaaatcagagcaaggagaaattttgacccagcctttcttggatgcttgcaagcatatactgcctgttatagacaagtttggagctgctatggcccttgttaaatctgacatcggtggtaacatatcgagattggaatctaagtattcctccaatccaaccaaattcaactacctgtacagtttggtacaagtasaggttgaaactaaaacggctaagtcatcatccagttgtaccaatggacttctttggcttacaagagcaatggatttcttagtggcattattccaaaacttaattgagcatgcagattggtcaatgtcacaagcctgtacagattcctataacaagactctaaagaagtggcatggctggcttgcaagttcaagcttcmctgtagcaatgaagcttgctcctgataggaaaaaattcatggaggtgatacaaggcactggtgatatcagtgctgatatacagaaattttgtactgacttttctcctatctttgaagagaatcmcaagtttytggctcgttgtggcttggatgatatgaaggcgtcatgaagtcacgggttcatgatcagaagtctcttgatgaatgactcttgcattcttactctcatgttgagttctaaaactctatgtttctttgtaggcatccagacccagcatgataaacattcaataacttcaatcgtgtaccgcaaattttttgttttgtgcttggtgggatagaatcttgagatattagcmcaattttacttggstacaaaaaacttgaactcgcatgttgttaatttattatttattattataaaaacacagatgattagttttgaggctc

SEQ ID NO: 722 - protein, 202 aa, Glycine max
  misc_feature: Ceres CLONE ID no.520979
  misc_feature: Bit score of 503.3 for HMM based on sequences of FIGURE 13.
  misc_feature (10)..(198): Pfam Name: GLTP Pfam Description: Glycolipid transfer protein (GLTP)
  misc_feature: Functional Homolog Of Ceres SEEDLINE ID no. ME08052 at SEQ ID NO. 697
  misc_feature (81)..(81): Xaa is any aa, unknown, or other
  misc_feature (147)..(147): Xaa is any aa, unknown, or other
  misc_feature (188)..(188): Xaa is any aa, unknown, or other
  misc_feature (191)..(191): Xaa is any aa, unknown, or other
MEGTVFTPALEGIKLVKSEQGEILTQPFLDACKHILPVIDKFGAAMALVKSDIGGNISRLESKYSSNPTKFNYLYSLVQVXVETKTAKSSSSCTNGLLWLTRAMDFLVALFQNLIEHADWSMSQACTDSYNKTLKKWHGWLASSSFXVAMKLAPDRKKFMEVIQGTGDISADIQKFCTDFSPIFEENXKFXARCGLDDMKAS

SEQ ID NO: 723 - protein, 222 aa, Oryza sativa subsp. japonica
  misc_feature: Public GI ID no.125600070
  misc_feature: Bit score of 461.5 for HMM based on sequences of FIGURE 13.
  misc_feature (10)..(200): Pfam Name: GLTP Pfam Description: Glycolipid transfer protein (GLTP)
  misc_feature: Functional Homolog Of Ceres SEEDLINE ID no. ME08052 at SEQ ID NO. 697
MEGTVFTPSLQGIKNVKSESGVILTKPFLEVCKHILPVLDKFGSAMSIVKNDIGGNITRLETKYASDPSKYEQLHSMVKVEISSKTAKSSSSCTNGLLWLTRAMDFLVALFHNLVQHPDWQMSQACSDAYSKTLKKWHGWLASSSFSEYLTIPEFQVAIKLAPDRKKFMEIISGSGDINADIEKFCATFSPLLAENHRFLVAVYNRFVYFQASVGMDDLKAS

SEQ ID NO: 724 - protein, 440 aa, Sorghum bicolor
  misc_feature: Ceres ANNOT ID no.6034905
  misc_feature: Bit score of 52.1 for HMM based on sequences of FIGURE 16.
  misc_feature (101)..(119): Pfam Name: IQ Pfam Description: IQ calmodulin-binding motif
  misc_feature: Functional Homolog Of Ceres SEEDLINE ID no. ME24091 at SEQ ID NO. 922
MGISARWLKSLVGLRKVERQQQHRKEDADVGRMKGDVADQFHFQNQRSQEDSSIAAQEEIPEVPYGNDPPEVDSNAPSCLEPTCDSAHVPLSQTEEELEEIWAATIIQTAFRAFLARRARRALKGLVRLQALVRGHIVRKQAATTLRCMQALVRVQARVRARRVRMALENQTDQQNTSPEHTIEARVREIEDGWCDSIGSVEDIQAKLLKRQEAAAKRERAMAYALAHQWQASSRQAASFEPDKNSWGWNWLERWMAVRPWESRFLGTYAADGIFVVNETRQPDISATKTPCRKPVKKHDSTLQSNTLNQKVFPSNSEGGGSSTNRSSGSASAKSRLKVLPREGAEEASSRPSVLVVRSTSNPRERTSNINSKERTGDLDCQVHKRFSLPGIGSEAGKHLTKKGTVNRSLKATKDSQILGSRHHLASSIDPVPTRVELET

SEQ ID NO: 725 - DNA, 1087 bp, Arabidopsis thaliana
  misc_feature: Ceres CLONE ID no.37919
  misc_feature: Encodes the peptide sequence at SEQ ID NO. 726
atatgtcaggaccggtccgcaggamaagcatgtaataaaactgtgtgttttctacattttctatgaaatgggtgtaattgaaagatactaaatgttagggcttttcagaaacttccgttacgttttaggcgtttaacacaattattattttctaaaacgagagccgtttaacgagaaagagaaatttctaactccagagagcgaagaacacaatcccagagtagcagaatctgatccatcccacctttttcaattctcaggcaaagataagtcaaagttgaaaatggaagggactgtgttcacgccttgtttggaaggaatgaagcatgtcaaatctgatcaaggcgagatgcttactaagccatttttagagctttgcaagaccatcttgcctgttatagataaatttggagctgctatgactctcgtcaaatctgacattggtggcaacataacgaggttggagaagaactacttgtctgatcccgacaagttcaagtacttgtacacctttgttcaagtcgaaattgagtctaagatagcaaaaggatcgtctagctgtacaaacggtcttctctggttaaccagagcaatggatttcttagtggagctgttccgaaacttggtagcacatcaagactggtcaatgccacaagcttgtgctgactcataccaaaaaacactcaagaaatggcacggatggctcgccagctctaccttctctatggctttaaagctagctccggacaggaagaagttcatggatgtcatatctggttctggtaacatccaagccgacatggaaaggttttgtgctgagtttggtccgtttcttcatgataatcataagtttctggctagcgtcggtatggatgacatgaaagcttcttaagtcatcatatgattatcgccggtatcaaatcttctttgccggaatctttgtctgttttaacttttctccttccaattatagaacctccaaaaagaaacagaataatgtgttggtttctatctgaatgttcactttatattacaagttataacatacgaatcaatcttatcaactcttcttgttaatgtttgttac

SEQ ID NO: 726 - protein, 202 aa, Arabidopsis thaliana
  misc_feature: Ceres CLONE ID no.37919
  misc_feature: Bit score of 492.0 for HMM based on sequences of FIGURE 13.
  misc_feature (10)..(198): Pfam Name: GLTP Pfam Description: Glycolipid transfer protein (GLTP)
  misc_feature: Functional Homolog Of Ceres SEEDLINE ID no. ME08052 at SEQ ID NO. 697
MEGTVFTPCLEGMKHVKSDQGEMLTKPFLELCKTILPVIDKFGAAMTLVKSDIGGNITRLEKNYLSDPDKFKYLYTFVQVEIESKIAKGSSSCTNGLLWLTRAMDFLVELFRNLVAHQDWSMPQACADSYQKTLKKWHGWLASSTFSMALKLAPDRKKFMDVISGSGNIQADMERFCAEFGPFLHDNHKFLASVGMDDMKAS

SEQ ID NO: 727 - DNA, 945 bp, Arabidopsis thaliana
  misc_feature: Ceres CLONE ID no.19302
  misc_feature: Encodes the peptide sequence at SEQ ID NO. 728
cgttacgttttaggcgtttaacacaattattattttctaaaacgagagccgtttaacgagaaagagaaatttctaactccagagagcgaagaacacaatcccagagtagcagaatctgatccatcccacctttttcaattctcaggcaaagtgtttgttgtcatattcagataagtcaaagttgaaaatggaagggactgtgttcacgccttgtttggaaggaatgaagcatgtcaaatctgatcaaggcgagatgcttactaagccatttttagagctttgcaagaccatcttgcctgttatagataaatttggagctgctatgactctcgtcaaatctgacattggtggcaacataacgaggttggagaagaactacttgtctgatcccgacaagttcaagtacttgtacacctttgttcaagtcgaaattgagtctaagatagcaaaaggatcgtctagctgtacaaacggtcttctctggttaaccagagcaatggatttcttagtggagctgttccgaaacttggtagcacatcaagactggtcaatgccacaagcttgtgctgactcataccaaaaaacactcaagaaatggcacggatggctcgccagctctaccttctctatggctttaaagctagctccggacaggaagaagttcatggatgtcatatctggttctggtaacatccaagccgacatggaaaggttttgtgctgagtttggtccgtttcttcatgataatcataagtttctggctagcgtcggtatggatgacatgaaagcttcttaagtcatcatatgattatcgccggtatcaaatcttctttgccggaatctttgtctgttttaacttttctccttccaattatagaacctccaaaaagaaacagaataatgtgttggtttctatctgaatgttcactttatattacaagttat

SEQ ID NO: 728 - protein, 202 aa, Arabidopsis thaliana; identical to SEQ ID NO: 726
  misc_feature: Ceres CLONE ID no.19302
  misc_feature: Bit score of 492.0 for HMM based on sequences of FIGURE 13.
  misc_feature (10)..(198): Pfam Name: GLTP Pfam Description: Glycolipid transfer protein (GLTP)
  misc_feature: Functional Homolog Of Ceres SEEDLINE ID no. ME08052 at SEQ ID NO. 697

SEQ ID NO: 729 - DNA, 756 bp, Populus balsamifera subsp. trichocarpa
  misc_feature: Ceres ANNOT ID no.1512801
  misc_feature: Encodes the peptide sequence at SEQ ID NO. 730
atgggggctgatggtctaggaactgtgtttacaccatcattggaaggaatgaagcacgtcaaatctgatcacggagaaatgctcactaaacctttcttggatgtctgcaaattgattttgcctgttatcgataagtttggagctgccatgacccttgtaaaatctgatatcggtacgagattggaaaacaagtatttgtctgatccgtctaaatacaaccacttatacactatgattcaagaggaggttgatgctaaaacagccaaaggatcttccagttgtaccaattgtcttctttggctaaccagagcaatggatttccttgtggaactgttcctgaatttacttgcacacccagattggacaatgtcacaagcctgtacagattcatatcgcaagacactgaagaaatttcatggctgggttgctagttcatattccactgttgtcatgaagcttgttccagacaggaagaagttcatggaagtaatttctggcccaggcaatgtttctgctgacatggagcaattctgtacaacctttcctccatttcttgaagagaatcacaagttcctgaaaccggttatcctgttattttcatttttttttttttttcgattccttcttgggaaattttgtttttgttttgagatattttatttttttatgttattaacttctttattcatattatctatccttcttattttatttagatcatttatttattataatgttgttgattttttttattag

SEQ ID NO: 730 - protein, 251 aa, Populus balsamifera subsp. trichocarpa
  misc_feature: Ceres ANNOT ID no.1512801
  misc_feature: Bit score of 455.2 for HMM based on sequences of FIGURE 13.
  misc_feature (14)..(193): Pfam Name: GLTP Pfam Description: Glycolipid transfer protein (GLTP)
  misc_feature: Functional Homolog Of Ceres SEEDLINE ID no. ME08052 at SEQ ID NO. 697
MGADGLGTVFTPSLEGMKHVKSDHGEMLTKPFLDVCKLILPVIDKFGAAMTLVKSDIGTRLENKYLSDPSKYNHLYTMIQEEVDAKTAKGSSSCTNCLLWLTRAMDFLVELFLNLLAHPDWTMSQACTDSYRKTLKKFHGWVASSYSTVVMKLVPDRKKFMEVISGPGNVSADMEQFCTTFPPFLEENHKFLKPVILLFSFFFFFRFLLGKFCFCFEIFYFFMLLTSLFILSILLILFRSFIYYNVVDFFY

SEQ ID NO: 731 - DNA, 615 bp, Populus balsamifera subsp. trichocarpa
  misc_feature: Ceres ANNOT ID no.1459528
  misc_feature: Encodes the peptide sequence at SEQ ID NO. 732
atgggggctgatggtctaggaactgtgtttacaccatcattggaaggaatgaagcacgtcaaatctgatcacggagaaatgctcactaaacctttcttggatgtctgcaaattgattttgcctgttatcgataagtttggagctgccatgacccttgtaaaatctgatatcggtacgagattggaaaacaagtatttgtctgatccgtctaaatacaaccacttatacactatgattcaagaggaggttgatgctaaaacagccaaaggatcttccagttgtaccaattgtcttctttggctaaccagagcaatggatttccttgtggaactgttcctgaatttacttgcacacccagattggacaatgtcacaagcctgtacagattcatatcgcaagacactgaagaaatttcatggctgggttgctagttcatattccactgttgtcatgaagcttgttccagacaggaagaagttcatggaagtaatttctggcccaggcaatgtttctgctgacatggagcaattctgtacaacctttcctccatttcttgaagagaatcacaagttcctggtattgcgcactgaggaaggcagtgttgcccacccttaa

SEQ ID NO: 732 - protein, 204 aa, Populus balsamifera subsp. trichocarpa
  misc_feature: Ceres ANNOT ID no.1459528
  misc_feature: Bit score of 457.3 for HMM based on sequences of FIGURE 13.
  misc_feature (14)..(198): Pfam Name: GLTP Pfam Description: Glycolipid transfer protein (GLTP)
  misc_feature: Functional Homolog Of Ceres SEEDLINE ID no. ME08052 at SEQ ID NO. 697
MGADGLGTVFTPSLEGMKHVKSDHGEMLTKPFLDVCKLILPVIDKFGAAMTLVKSDIGTRLENKYLSDPSKYNHLYTMIQEEVDAKTAKGSSSCTNCLLWLTRAMDFLVELFLNLLAHPDWTMSQACTDSYRKTLKKFHGWVASSYSTVVMKLVPDRKKFMEVISGPGNVSADMEQFCTTFPPFLEENHKFLVLRTEEGSVAHP

SEQ ID NO: 733 - protein, 204 aa, Oryza sativa subsp. indica
  misc_feature: Public GI ID no.125558165
  misc_feature: Bit score of 438.1 for HMM based on sequences of FIGURE 13.
  misc_feature (10)..(200): Pfam Name: GLTP Pfam Description: Glycolipid transfer protein (GLTP)
  misc_feature: Functional Homolog Of Ceres SEEDLINE ID no. ME08052 at SEQ ID NO. 697
MEGTVFTPSLQGIKNVKSESGVILTKPFLEVCKHILPVLDKFGSAMSIVKNDIGGNITRLETKYASDPSKYEQLHSMVKVEISSKTAKSSSSCTNGLLWLTRAMDFLVALFHNLVQHPDWQMSQACSDAYSKTLKKWHGWLASSSFSEYLTIPEFQVAIKLAPDRKKFMEIISGSGDINADIEKFCATFSPLLAENHRFLLLSQ

SEQ ID NO: 734 - DNA, 627 bp, Populus balsamifera subsp. trichocarpa
  misc_feature: Ceres ANNOT ID no.1442716
  misc_feature: Encodes the peptide sequence at SEQ ID NO. 735
atggagggaaatgtgtttgctgaagctttggaaaagatggaccatgttaagtctcccgagggagaaattcttgccaagccttttttggatttgtgcaaaacagtattgcctgttttagacaactttggaccagccatgggacctgtaaaatctgacattggtggtaatatatcgaggctggagactaggtatttgtccaatcaatcagaattcaattacttgtacaggatagtacagtcagaaattgaatcgaaaaaggctaaatcttcatccagttgcacaaatgctttactttggctgacaagggccatggatttcttgtcagaactgttccgcaacttaatggtgcatccggactggagcatgtcacaagtttgcactgattcatacgacaagtccctgaaaaaatggcatggctggctggctagttcaagttttagcgtaaacacttgtagcatcaatgttgccttgaagttggctccggataggaagaagtttatgagtgtagtgggtgtcaaaggagatgatgtttctgacattgaagatttctgtggaaggttctcacctttattggaagagaatcacaagttcctcgctagtgttggaatggacaatttgaaagcttga

SEQ ID NO: 735 - protein, 208 aa, Populus balsamifera subsp. trichocarpa
  misc_feature: Ceres ANNOT ID no.1442716
  misc_feature: Bit score of 411.7 for HMM based on sequences of FIGURE 13.
  misc_feature (10)..(205): Pfam Name: GLTP Pfam Description: Glycolipid transfer protein (GLTP)
  misc_feature: Functional Homolog Of Ceres SEEDLINE ID no. ME08052 at SEQ ID NO. 697
MEGNVFAEALEKMDHVKSPEGEILAKPFLDLCKTVLPVLDNFGPAMGPVKSDIGGNISRLETRYLSNQSEFNYLYRIVQSEIESKKAKSSSSCTNALLWLTRAMDFLSELFRNLMVHPDWSMSQVCTDSYDKSLKKWHGWLASSSFSVNTCSINVALKLAPDRKKFMSVVGVKGDDVSDIEDFCGRFSPLLEENHKFLASVGMDNLKA

SEQ ID NO: 736 - DNA, 675 bp, Populus balsamifera subsp. trichocarpa
  misc_feature: Ceres ANNOT ID no.1505342
  misc_feature: Encodes the peptide sequence at SEQ ID NO. 737
atgaaaaggacgagagaaatggagaaaggatcagagatacagtctgcaattgaagaactgtcgatgctgatcgaactcaagcccacaggtgacaatcttgataggactactactgttcatatacccacaaggccctttttaaacgtctgcaaccttgttattcaggttcttgataagataggcccaacaatggcagttttgagacaagatatcaatcagaatattcagagattggagatgctatgtaattctgatccttcaatatactccaatttggtcgagattttaaagaaagaggccgatgaaggcaatgcaagaaagggtgccagctgcagtaaagcctttgtgtggcttgccagatccttggattttacgggtgctttgttacaaagattagtggcggatcctggtcagaaaatggagcaactcgtggaggaatcttacagcatcactttaaagccttggcatggttggatttcaacagctgcttataaagtttctcttaaattactgcctgataataaaacgttcattaatctgctcatgccgaaagatgaaacctacgacaacctaaatgagcatgtgcaaacattcatctcattacttgtaccttttctagaagagatccactctattctgatactatatggattggataggctgaagtctacttag

SEQ ID NO: 737 - protein, 203 aa, Populus balsamifera subsp. trichocarpa
  misc_feature: Ceres ANNOT ID no.1505342
  misc_feature: Bit score of 146.2 for HMM based on sequences of FIGURE 13.
  misc_feature (20)..(199): Pfam Name: GLTP Pfam Description: Glycolipid transfer protein (GLTP)
  misc_feature: Functional Homolog Of Ceres SEEDLINE ID no. ME08052 at SEQ ID NO. 697
MLIELKPTGDNLDRTTTVHIPTRPFLNVCNLVIQVLDKIGPTMAVLRQDINQNIQRLEMLCNSDPSIYSNLVEILKKEADEGNARKGASCSKAFVWLARSLDFTGALLQRLVADPGQKMEQLVEESYSITLKPWHGWISTAAYKVSLKLLPDNKTFINLLMPKDETYDNLNEHVQTFISLLVPFLEEIHSILILYGLDRLKST

SEQ ID NO: 738 - DNA, 759 bp, Populus balsamifera subsp. trichocarpa
  misc_feature: Ceres ANNOT ID no.1452248
  misc_feature: Encodes the peptide sequence at SEQ ID NO. 739
atggagaaaggatcagagatacagtctgcaattgaagaactgtcgatgctgatcgaactcaagcccacaggtgacaatcttgataggactactactgttcatatacccacaaggccctttttaaacgtctgcaaccttgttattcaggttcttgataagataggcccaacaatggcagttttgagacaagatatcaatcagaatattcagagattggagatgctatgtaattctgatccttcaatatactccaatttggtcgagattttaaagaaagaggccgatgaaggcaatgcaagaaagggtgccagctgcagtaaagcctttgtgtggcttgccagatccttggattttacgggtgctttgttacaaagattagtggcggatcctggtcagaaaatggagcaactcgtggaggaatcttacagcatcactttaaagccttggcatggttggatttcaacagctgcttataaagtttctcttaaattactgcctgataataaaacgttcattaatctgctcatgccgaaagatgaaacctacgacaacctaaatgagcatgtgcaaacattcatctcattacttgtaccttttctagaagagatccactctattctggcagtgttcttaatcccaaaagttgtagccataacaatctcgaaaaaagttgctctggcctcttcctcctctgccactctcattagtgcttcagcggtttgtatcagagcttgggctgagcttctagcaacattctaa

SEQ ID NO: 739 - protein, 237 aa, Populus balsamifera subsp. trichocarpa
  misc_feature: Ceres ANNOT ID no.1452248
  misc_feature: Bit score of 135.0 for HMM based on sequences of FIGURE 13.
  misc_feature (20)..(199): Pfam Name: GLTP Pfam Description: Glycolipid transfer protein (GLTP)
  misc_feature: Functional Homolog Of Ceres SEEDLINE ID no. ME08052 at SEQ ID NO. 697
MLIELKPTGDNLDRTTTVHIPTRPFLNVCNLVIQVLDKIGPTMAVLRQDINQNIQRLEMLCNSDPSIYSNLVEILKKEADEGNARKGASCSKAFVWLARSLDFTGALLQRLVADPGQKMEQLVEESYSITLKPWHGWISTAAYKVSLKLLPDNKTFINLLMPKDETYDNLNEHVQTFISLLVPFLEEIHSILAVFLIPKVVAITISKKVALASSSSATLISASAVCIRAWAELLATF

SEQ ID NO: 740 - protein, 266 aa, Oryza sativa subsp. japonica
  misc_feature: Public GI ID no.38344077
  misc_feature: Bit score of 134.6 for HMM based on sequences of FIGURE 13.
  misc_feature (76)..(262): Pfam Name: GLTP Pfam Description: Glycolipid transfer protein (GLTP)
  misc_feature: Functional Homolog Of Ceres SEEDLINE ID no. ME08052 at SEQ ID NO. 697
MDDGPCGESEGGGDAAAKAVGAKDAGEGDEPKEEEEDGRDREEEEEEAAKRGWSEIRLAIEELSAVDVERRGGKPPPPLPPPPTLTFLALSHLLLQVLDKIGPTMAVLRLDVQRNIERLQELYLLDPSKYYNLEEILEKEVDEGTARKVDSCARAILWLTRSMDFTIALLQRLEEDSDQKCFAQLVESAYMVTLKPWHGWISSAAYKIAMKLIPDRKMFINLLVGKCQDCAALKEEIRKLAKLLKPFLDDIHAMMAKFRLDRLKST

SEQ ID NO: 741 - protein, 266 aa, Oryza sativa
  misc_feature: Public GI ID no.116309799
  misc_feature: Bit score of 135.1 for HMM based on sequences of FIGURE 13.
  misc_feature (62)..(262): Pfam Name: GLTP Pfam Description: Glycolipid transfer protein (GLTP)
  misc_feature: Functional Homolog Of Ceres SEEDLINE ID no. ME08052 at SEQ ID NO. 697
MDDGPCGESEGGGDAAAKAVGAKDAGEGDEPKEEEEDGRDREEEEEESAKRGWSEIRLAIEELSAVDVERRGGKPPPPSPPPPTLTFLALSHLLLQVLDKIGPTMAVLRLDVQRNIERLQELYLLDPSKYYNLEEILEKEVDEGTARKVDSCARAILWLTRSMDFTIALLQRLEEDSDQKCFAQLVESAYMVTLKPWHGWISSAAYKIAMKLIPDRKMFINLLVGKCQDCAALKEEIRKLAKLLKPFLDDIHAMMAKFRLDRLKST

SEQ ID NO: 742 - protein, 233 aa, Arabidopsis thaliana
  misc_feature: Public GI ID no.9280228
  misc_feature: Bit score of 141.3 for HMM based on sequences of FIGURE 13.
  misc_feature (34)..(229): Pfam Name: GLTP Pfam Description: Glycolipid transfer protein (GLTP)
  misc_feature: Functional Homolog Of Ceres SEEDLINE ID no. ME08052 at SEQ ID NO. 697
MKRKRCEMEETTKKKKMTEIGSAIEELSVLSIAKTTIVTTEKEAINIINLPLKPLLSFCNIIVQVLDKIGPTMAVLRHDIDQNIQRLEKMWESDPLVYSNLVEILRKEAKEGSSRKPKSCSRAALWLTRAMDFTLALLQRLVKDMSQNMEQAIEECYNLTIKPWHGWISSAAFKVALKLVPNNNTFINVLAAKDETHQMVQDDITSLISLLIPLLSQLHSILELYEVSKLKSP

SEQ ID NO: 743 - protein, 223 aa, Arabidopsis thaliana
  misc_feature: Public GI ID no.45773920
  misc_feature: Bit score of 139.3 for HMM based on sequences of FIGURE 13.
  misc_feature (34)..(219): Pfam Name: GLTP Pfam Description: Glycolipid transfer protein (GLTP)
  misc_feature: Functional Homolog Of Ceres SEEDLINE ID no. ME08052 at SEQ ID NO. 697
MKRKRYEMEKKKKTEIQTAIEELSVFIVTKPADKTEATHIPLRPILSFCSLIIQVLDKIGPTMAVLRQDIDQNIQRLEKFYETDSCVYSNLAEILKKEKEEGTSKMVASCGRALFWLTRTMDFTAGLLRLLSKEMSSKMEELVEECYMTTLKPHHGWIASAAFKVCLKLVPDNKTFMEAIGARDESYDTLREDIDTLSSLLTPILKEIYFVLEQYGLSRLRSM

SEQ ID NO: 744 - DNA, 1183 bp, Panicum virgatum
  misc_feature: Ceres CLONE ID no.1959299
  misc_feature: Encodes the peptide sequence at SEQ ID NO. 745
gctaaaaaaatctttgtttctgctacaataggagagtggagcctgtgattgttgcgacctcccaggcatttgacttcctctcttcccctctcactttttttttgaaagaactctctctccccctcttactccacggagcagcaaagcagcagggaggataagcttggaatgccctggtagcgagagggtgcagcgggagccgacggcgtccatggtggagagcgagagaggcgaggaagaagccattgccctcaccggcggcggtggcggtggacagctgcagcaggatggcgtggtctccggcgcggcggagggcgagagggacggcgaggagggagacgcggaggacggcgaacgggaggaggaggaggaaggccgggacgacgtggacgggtggtcggagataaggctggccatcgacgagctgtccccggcgaggctcatcaagcaccgcggccgcggcggcgatggggatgacgacaagccggccgcgccgtccccgcccacgctgcccttcctggcgctgtcccacctccttctccgcgtgctcgataagatcggcccgaccatggccgtgctgcggctcgacgtccaacggaacatcgagaggctgcaggagctgtacttgatggacccagccaagtactccacgctaacggagatagtggagaaggaggtcaaggagggcactgcaaggaaggtcgatagctgtgcaagggctgtcctgtggcttgctagatccatggatttcacaattgcgctgttacagaaattagaggaggacactgccgagcagagtcttgcacagcttgtcgaagctgcgtacgaggtcagcctaaagccatggcacggctggatctcctcggcggcatgcaagatagcgctgcaactcatccccgagaggaaggtcttcaccagcttgctcctagggatgggtcaagactgctccgctctgaaggatgagatcgagaagctcgcattactgctccggccccttcttgatgacatccactccatgatggccaagttcagactggacaggctcaagtcgacgtgatccatggcactggccggcaaggcccaatgtcccaagctatcagttgccgctctgtgaatattgccctgattgtatttcccagtcctgtaaaggttccatgtccgttttgcagcagctgttctagtt

SEQ ID NO: 745 - protein, 281 aa, Panicum virgatum
  misc_feature: Ceres CLONE ID no.1959299
  misc_feature: Bit score of 128.5 for HMM based on sequences of FIGURE 13.
  misc_feature (91)..(277): Pfam Name: GLTP Pfam Description: Glycolipid transfer protein (GLTP)
  misc_feature: Functional Homolog Of Ceres SEEDLINE ID no. ME08052 at SEQ ID NO. 697
MVESERGEEEAIALTGGGGGGQLQQDGVVSGAAEGERDGEEGDAEDGEREEEEEGRDDVDGWSEIRLAIDELSPARLIKHRGRGGDGDDDKPAAPSPPTLPFLALSHLLLRVLDKIGPTMAVLRLDVQRNIERLQELYLMDPAKYSTLTEIVEKEVKEGTARKVDSCARAVLWLARSMDFTIALLQKLEEDTAEQSLAQLVEAAYEVSLKPWHGWISSAACKIALQLIPERKVFTSLLLGMGQDCSALKDEIEKLALLLRPLLDDIHSMMAKFRLDRLKST

SEQ ID NO: 746 - protein, 276 aa, Oryza sativa subsp. japonica
  misc_feature: Public GI ID no.39545646
  misc_feature: Bit score of 105.9 for HMM based on sequences of FIGURE 13.
  misc_feature (76)..(265): Pfam Name: GLTP Pfam Description: Glycolipid transfer protein (GLTP)
  misc_feature: Functional Homolog Of Ceres SEEDLINE ID no. ME08052 at SEQ ID NO. 697
MDDGPCGESEGGGDAAAKAVGAKDAGEGDEPKEEEEDGRDREEEEEEAAKRGWSEIRLAIEELSAVDVERRGGKPPPPLPPPPTLTFLALSHLLLQVLDKIGPTMAVLRLDVQRNIERLQELYLLDPSKYYNLEEILEKEVDEGTARKVDSCARAILWLTRSMDFTIALLQRLEEDSDQKCFAQLVESAYMVTLKPWHGWISSAAYKIAMKLIPDRKMFINLLVGKCQDCAALKEEIRKLAKLLKPFLDDIHAMMFFKIPYSIFNKLIWQNEKISQ

SEQ ID NO: 747 - protein, 297 aa, Oryza sativa subsp. indica
  misc_feature: Public GI ID no.125548401
  misc_feature: Bit score of 106.4 for HMM based on sequences of FIGURE 13.
  misc_feature (83)..(286): Pfam Name: GLTP Pfam Description: Glycolipid transfer protein (GLTP)
  misc_feature: Functional Homolog Of Ceres SEEDLINE ID no. ME08052 at SEQ ID NO. 697
MVVETETGRDESEAAAATASAMDDGPCGESEGGGDAAAKAVGAKDAGEGDEPKEEEEDGRDREEEEEEAAKRGWSEIRLAIEELSAVDVERRGGKPPPPSPPPPTLTFLALSHLLLQVLDKIGPTMAVLRLDVQRNIERLQELYLLDPSKYYNLEEILEKEVDEGTARKVDSCARAILWLTRSMDFTIALLQRLEEDSDQKCFAQLVESAYMVTLKPWHGWISSAAYKIAMKLIPDRKMFINLLVGKCQDCAALKEEIRKLAKLLKPFLDDIHAMMFFKIPYSIFNKLIWQNEKISQ

SEQ ID NO: 748 - DNA, 837 bp, Populus balsamifera subsp. trichocarpa
  misc_feature: Ceres ANNOT ID no.1443167
  misc_feature: Encodes the peptide sequence at SEQ ID NO. 749
atgaaaaggaccagagaaatagagaagggatcagagatcaagtctgcaattgaagaactttcgatgctgatcaaactcaagcctacaggtgacaatcacgataggactactgttcatatacccacaaggccttttatgtatgtctgcaaccttgttattcaggttcttgataagataggcccaacaatgacagttttgagacaagatattgatcagaatattcagagattgaagatgctatgtgattctgatccttcaatgtactccaatttggttgagattttaaagaaagaggccgatgaaggcggtgcaagaaagggtgccagctgcagtaaagcctctgtttggcttgccagatccttggattttacggttgctttgttagaaaggttagtggcggatcctggtcaggaaatggagaaactcgtggaagaatcttacaacatcactttaaagccatggcatggttggatttcatcagccgcttataaagtagctcttaaattagtacctgataataaaaccttgattgatctgctcatgccaaaagacgaaacctacgacacccttaaagaggatgtgcaaacattgatctcactacttgtgccttttttagaagagatccactctgttctgttaccctggcctcttcctccctcgttagcccttcaggggcttgttgtcagagtttgtgttgagctcctagcaacattccaagaaaatatgtcttcaagcgaaggtatctttggtatgagagctagtgaatttttccattgctgcgtccttccacctgatcatagccagcagtggacttcgtaccctatgcaattagattga

SEQ ID NO: 749 - protein, 257 aa, Populus balsamifera subsp. trichocarpa
  misc_feature: Ceres ANNOT ID no.1443167
  misc_feature: Bit score of 116.2 for HMM based on sequences of FIGURE 13.
  misc_feature (11)..(202): Pfam Name: GLTP Pfam Description: Glycolipid transfer protein (GLTP)
  misc_feature: Functional Homolog Of Ceres SEEDLINE ID no. ME08052 at SEQ ID NO. 697
MLIKLKPTGDNHDRTTVHIPTRPFMYVCNLVIQVLDKIGPTMTVLRQDIDQNIQRLKMLCDSDPSMYSNLVEILKKEADEGGARKGASCSKASVWLARSLDFTVALLERLVADPGQEMEKLVEESYNITLKPWHGWISSAAYKVALKLVPDNKTLIDLLMPKDETYDTLKEDVQTLISLLVPFLEEIHSVLLPWPLPPSLALQGLVVRVCVELLATFQENMSSSEGIFGMRASEFFHCCVLPPDHSQQWTSYPMQLD

SEQ ID NO: 750 - DNA, 1424 bp, Zea mays
  misc_feature: Ceres CLONE ID no.264471
  misc_feature: Encodes the peptide sequence at SEQ ID NO. 751
gagctcctagtaaagtagtaatagcgtgcctgtttctacagggcttcccgtactgacactgatacctgcctggatattattagtaggatatagtatatattatggtctcaagggctgctaccgattggagggtcaggtcttcattcgcaaaacacagacatttgacttgcgctctccctttctctctctctctgtgtgtatgtgtgtgtgtgtctcaggttctcagcaaagagcagggaggataagcttggaatgcctcggcagtgagagctgcaactgcaacaaagcaaccggcgtccatggtggagagggaaaggggcgagggagaagccagggccctggccagcgggcactgcagcagcagcagcagcaggaaggagcagcggagggcgagagggtcgagaaagaaggagacgagcgggaggaggaggatcgagacgacgaagccgtggagtggtccgagatacggctcgccatcgaggagctgtccccggcggcccatctcaagcgcggcgacggcgatgccaaggcggccgcgtcgtccctgcccacgctccgcttcctggcgctgtcgcacctcctcgttcgagtgctcgataagatcgggccgaccatggccgtgctgaggctcgacgtccaacggaacatcgagaggctgcaggagctgtacctgctggacccagccacgtactcgaccctgacggggatagtggagaaggaagtgaaggagggcacagcgaggaaggtcgacagctgcgcaagggcgatcctatggcttgctagatccatggatttcacagctgcgctgttacagaggctggaggaggactctgcgcagcagcagcagcagagcctcgcgcagctcgtggaagccgcgtacgaggccaccctgaagccgtggcacggctggatctcctcggcggcgtgcaagatagcgtggaagctcatccccgagaggaaggtcttcaccggcatgctgctggggatgggccaggactgctctgcactcggggacgacatcgggcggctcgcgctgttgcttcggcccttcctcgatgacatccactccatgatggccaagttcagactggacaggctcaagtcgacgtgatccatggatggcgaacacgacgcaagcccaagccatggacatggtccccgtccttcgctgtgaatactgcctgccctggctttactcttggagtcgcatttgcttgcggttaggtctagtttagacgctgctgctctctagtctatacataggtcttttgcttgtagaatagactcccaagatctgcatgctgtgcccttttttcgtggtagggtacgtttggacagcgccctcctcaattgcctttgcctgtgccaatacgttggccggccaaactttggctgcccaagaaacggaaaaaaaaacttcgtgc

SEQ ID NO: 751 - protein, 303 aa, Zea mays
  misc_feature: Ceres CLONE ID no.264471
  misc_feature: Bit score of 127.8 for HMM based on sequences of FIGURE 13.
  misc_feature (103)..(299): Pfam Name: GLTP Pfam Description: Glycolipid transfer protein (GLTP)
  misc_feature: Functional Homolog Of Ceres SEEDLINE ID no. ME08052 at SEQ ID NO. 697
MCVCVSGSQQRAGRISLECLGSESCNCNKATGVHGGEGKGRGRSQGPGQRALQQQQQQEGAAEGERVEKEGDEREEEDRDDEAVEWSEIRLAIEELSPAAHLKRGDGDAKAAASSLPTLRFLALSHLLVRVLDKIGPTMAVLRLDVQRNIERLQELYLLDPATYSTLTGIVEKEVKEGTARKVDSCARAILWLARSMDFTAALLQRLEEDSAQQQQQSLAQLVEAAYEATLKPWHGWISSAACKIAWKLIPERKVFTGMLLGMGQDCSALGDDIGRLALLLRPFLDDIHSMMAKFRLDRLKST

SEQ ID NO: 752 - protein, 235 aa, Oryza sativa subsp. japonica
  misc_feature: Public GI ID no.42408243
  misc_feature: Bit score of 89.1 for HMM based on sequences of FIGURE 13.
  misc_feature (50)..(231): Pfam Name: GLTP Pfam Description: Glycolipid transfer protein (GLTP)
  misc_feature: Functional Homolog Of Ceres SEEDLINE ID no. ME08052 at SEQ ID NO. 697
MEVRREEMMEKGKSELRIAMEELSLPCPGDDEDEQQQRQKRSSTMDLLCVSKHIIHVLDEIGPTLLVLRQDIQQNVQRLQDVLARDPSKYSSLTAIVTEEVEEGTSKKANSCTRAILWLASAVLRILPIRSINFSKHLLEGLLNTCDQSSLREIVEKAYITTLKPWHGWISSAAYRVAQKLIPEKEIFIALLMGNCQEFEVFAKDVKVLLSIVQPLIEEANAVLVKHNLDKLKST

SEQ ID NO: 753 - protein, 245 aa, Oryza sativa subsp. japonica
  misc_feature: Public GI ID no.115474419
  misc_feature: Bit score of 72.0 for HMM based on sequences of FIGURE 13.
  misc_feature (50)..(231): Pfam Name: GLTP Pfam Description: Glycolipid transfer protein (GLTP)
  misc_feature: Functional Homolog Of Ceres SEEDLINE ID no. ME08052 at SEQ ID NO. 697
MEVRREEMMEKGKSELRIAMEELSLPCPGDDEDEQQQRQKRSSTMDLLCVSKHIIHVLDEIGPTLLVLRQDIQQNVQRLQDVLARDPSKYSSLTAIVTEEVEEGTSKKANSCTRAILWLASAVLRILPIRSINFSKHLLEGLLNTCDQSSLREIVEKAYITTLKPWHGWISSAAYRVAQKLIPEKEIFIALLMGNCQEFEVFAKDVKVLLSIVQPLIEEANAVLVRAPMIAHLSVKHNLDKLKST

SEQ ID NO: 754 - DNA, 585 bp, Sorghum bicolor
  misc_feature: Ceres ANNOT ID no.6113990
  misc_feature: Encodes the peptide sequence at SEQ ID NO. 755
atggcagagacggtgttcaccccatctttggaagggatgaagcatgtcaaggcagagaacggagtcattctcaccaagcccttccttgatgtctgcaagcaaatcttgcctgtcctcgataaatttggagctgctatggcaattgtaaagactgatatcggtggcaatatcacaagactggaaaacaagtattgttcagatccatcaaagtatgaacatttgtacaccatggctcaggaagaagttcaaaacaagaccgcaaaaggttcctcaagctgcacaaatgggcttctgtggctcacgagggccatggatttccttgtcgagttgtttcgtaacctgcttgagcatccagattggaccatgagtcaagcttgcactgattcatacaccaagactctgaagaaatttcatggctggcttgccagttctagttttacggtggccatgaagcttgctcccaatagagataaatttatggaggtcattagtggaactggtgacatcaatgcagatattgagaaattttgcacaaccttctcacctttcctcaaagaaaatcacaactttctgctggaattttag

SEQ ID NO: 755 - protein, 194 aa, Sorghum bicolor
  misc_feature: Ceres ANNOT ID no.6113990
  misc_feature: Bit score of 508.0 for HMM based on sequences of FIGURE 13.
  misc_feature (10)..(193): Pfam Name: GLTP Pfam Description: Glycolipid transfer protein (GLTP)
  misc_feature: Functional Homolog Of Ceres SEEDLINE ID no. ME08052 at SEQ ID NO. 697
MAETVFTPSLEGMKHVKAENGVILTKPFLDVCKQILPVLDKFGAAMAIVKTDIGGNITRLENKYCSDPSKYEHLYTMAQEEVQNKTAKGSSSCTNGLLWLTRAMDFLVELFRNLLEHPDWTMSQACTDSYTKTLKKFHGWLASSSFTVAMKLAPNRDKFMEVISGTGDINADIEKFCTTFSPFLKENHNFLLEF

SEQ ID NO: 756 - DNA, 630 bp, Sorghum bicolor
  misc_feature: Ceres ANNOT ID no.6041251
  misc_feature: Encodes the peptide sequence at SEQ ID NO. 757
atggaggggaccgtgttcacaccctcccttgaggggatgaagcatgtcaagtcggagagtggcgtgatcctgaccaagccgtttctccaagtatgcaagcaaatccttccagtgctagagaaatttgggtcagccatgtcgattgtcaagacggacattggaggcaatatcacgaggctggagacaaaatatgcttctgatcctacaaagtatgaacagttgcacagcttggtgaaagtagaagtcagcgccaagactgccaaaagctctagcagctgtactaatggccttctctggctgacaagagccatggacttcttggttgcgctgttccacaatttggtacatcatccagactggcagatgtcacaagcttgcagtgacgcttacagcaaaacactgaagaaatggcatggctggttggcgagttcgagcttttcggttgccataaagcttgcaccagacaggaagaagttcatggacatcatcagtggttcaggcgacatcaacgctgatattgagaagttctgcgcaacattctcccctttgctggcagaaaaccacaagtttctggctgttgatggtgtttttggatatgtgaaagtatggcattatcaccatcaacaataa

SEQ ID NO: 757 - protein, 209 aa, Sorghum bicolor
  misc_feature: Ceres ANNOT ID no.6041251
  misc_feature: Bit score of 470.3 for HMM based on sequences of FIGURE 13.
  misc_feature (10)..(201): Pfam Name: GLTP Pfam Description: Glycolipid transfer protein (GLTP)
  misc_feature: Functional Homolog Of Ceres SEEDLINE ID no. ME08052 at SEQ ID NO. 697
MEGTVFTPSLEGMKHVKSESGVILTKPFLQVCKQILPVLEKFGSAMSIVKTDIGGNITRLETKYASDPTKYEQLHSLVKVEVSAKTAKSSSSCTNGLLWLTRAMDFLVALFHNLVHHPDWQMSQACSDAYSKTLKKWHGWLASSSFSVAIKLAPDRKKFMDIISGSGDINADIEKFCATFSPLLAENHKFLAVDGVFGYVKVWHYHHQQ

SEQ ID NO: 758 - DNA, 846 bp, Sorghum bicolor
  misc_feature: Ceres ANNOT ID no.6112309
  misc_feature: Encodes the peptide sequence at SEQ ID NO. 759
atggtggagagggaaagagacgagggagaagcagccagggccctgaccaccgggccaccgcagcagcagcagcaggaggaggaggaggaggaggaaggagcagcggagggcgagagcgacgaggaagcgggagacgagcgggaagaggaggaggatcatcgagacgacgacgaagccgtggagtggtcggagatacggctcgccatcgaggagctgtccccgccggcccgtctcaagcacggcggcggcggcgacgatggcaaggcggccgcgtcgtcggtgcccactctgcgcttcctggcgctgtcgcacctcctcctccgcgtgctcgataagatcgggccgaccatggccgtgctgaggctcgacgtccaacggaacatcgagaggctgcaggagctgtacctgttggacccagccaagtactctaccctaacggaggtagtggagaaggaagtcaaggagggcactgcaaggaaggtcgatagctgtgcaagggctgtcctgtggcttgctagatccatggacttcacaattgcgctgttagtgagcatagaagaggactctgatgagcagcagcagcagagcctcgcgcagcttgtcgaagccgcgtacgaggcctgcctgaagccatggcatggctggatctcttcggcggcgtgcaagatagcgctgaagctcatccctgagaggaaggtcttcaccagcctgctgctggggatgggccaagactgctctgatctcaaggatgagatcaggaggctcgcgttgctgctccgccccctccttgatgacatccactccatgatggccaagttcagactggacaggctcaagtcgacgtga

SEQ ID NO: 759 - protein, 281 aa, Sorghum bicolor
  misc_feature: Ceres ANNOT ID no.6112309
  misc_feature: Bit score of 126.7 for HMM based on sequences of FIGURE 13.
  misc_feature (79)..(277): Pfam Name: GLTP Pfam Description: Glycolipid transfer protein (GLTP)
  misc_feature: Functional Homolog Of Ceres SEEDLINE ID no. ME08052 at SEQ ID NO. 697
MVERERDEGEAARALTTGPPQQQQQEEEEEEEGAAEGESDEEAGDEREEEEDHRDDDEAVEWSEIRLAIEELSPPARLKHGGGGDDGKAAASSVPTLRFLALSHLLLRVLDKIGPTMAVLRLDVQRNIERLQELYLLDPAKYSTLTEVVEKEVKEGTARKVDSCARAVLWLARSMDFTIALLVSIEEDSDEQQQQSLAQLVEAAYEACLKPWHGWISSAACKIALKLIPERKVFTSLLLGMGQDCSDLKDEIRRLALLLRPLLDDIHSMMAKFRLDRLKST

SEQ ID NO: 760 - DNA, 693 bp, Sorghum bicolor
  misc_feature: Ceres ANNOT ID no.6030204
  misc_feature: Encodes the peptide sequence at SEQ ID NO. 761
atggagaggaaacggaaggagatggagaagggcaagtctgagctgagagtggccatggaggagcttcgtttgtgcagctcaggagatggggaggaggatcaggtgcaggtgcagcaggtgaaagtgcaggagcagcccaagtcatccaccatggacctcctctctgtctccaagcagctcatccatgtccttgatgagattggaccaacgttgctagtcctgaggcaggacattcagcaaaatgttcagagattacaagatctgcatgaaagagactcttccaaatatgctagcttgacgacgatagttactgaggaaattgagcaagggacagcaaagaagaccaaaagctgcaccagagctatcatctggctgtctaggtcgataaatttctcaaaatatttactggagaagctgctaaaaacacctgagtcaagcctggaagagattgtcgaagaagcctatggaaatactctgaagccatggcatggctggatctcatcagctgcttacaaggtagcactgaagctcatcccagaaagagaattcttcatagcgctgctgatgggtaattgtcaagactttgaggatcttgcagaagatgccaagacgttggcctatgctgtccagcccctgttagaggagatcgatgcaatttcggtcagggcttcgaacttcacatctgtttgctaa

SEQ ID NO: 761 - protein, 230 aa, Sorghum bicolor
  misc_feature: Ceres ANNOT ID no.6030204
  misc_feature: Bit score of 96.7 for HMM based on sequences of FIGURE 13.
  misc_feature (54)..(218): Pfam Name: GLTP Pfam Description: Glycolipid transfer protein (GLTP)
  misc_feature: Functional Homolog Of Ceres SEEDLINE ID no. ME08052 at SEQ ID NO. 697
MERKRKEMEKGKSELRVAMEELRLCSSGDGEEDQVQVQQVKVQEQPKSSTMDLLSVSKQLIHVLDEIGPTLLVLRQDIQQNVQRLQDLHERDSSKYASLTTIVTEEIEQGTAKKTKSCTRAIIWLSRSINFSKYLLEKLLKTPESSLEEIVEEAYGNTLKPWHGWISSAAYKVALKLIPEREFFIALLMGNCQDFEDLAEDAKTLAYAVQPLLEEIDAISVRASNFTSVC

SEQ ID NO: 762 - DNA, 1732 bp, Arabidopsis thaliana
  misc_feature: Ceres SEEDLINE ID no.ME08564
  misc_feature: Encodes the peptide sequence at SEQ ID NO. 764
actcttccgtttcgagctctctctcacacacattgaatttcaaggtcgcgacgcgaaatatgagctctgaataacaaacaaacagagttggtgtcgatatcaaggcatgagagatggttagagaaaatgctgtaatgggtggtgccagtgaagagcgtggtgttcgggtcactcgagcaatggctagagctgttttgggtggggtctctgcctcttctagaccgtccttcaagaagcaacacaagaacaacaagggtttcggtagggtagcactagcagatgtcactaacataagcaagaaagggtgtgctacatcaaaatctcaggcaagaggaggttacaagaagactaacacaaagggagcttccaatgtctccattcaagttttgtcaactcaagaagatgttagagcaaaattagcaaaagatttaccctcaatatcaatggtacagtcacatgacgctaatgtagctgaaaggcaggaaggcacagaggtagtgcaaccttctatgtctgttatggcaggtcctctgctttcaatgcaggactctatgaagtctgatgaaatccttcgctctccaaacaaagacgttgatatgatgattactgagaaactaaaactttcagatggtttggacattgtggacattgattcaagtggagttaaaggatcctcaagtttggagttcatatgcccctgatatatacaatagtatatttgtcagggagtttgaaaggagaccgtcaagtgattacatggatatgttgcagcaagatatcactccaagcatgcgagggattctgattgattggcttgtggaggtttctgaggaatataagctacttccagatactctttaccttacagtgaatctgattgatcggtctctttctcaaagtttggttcagaaacaaaggctccagttgctgggtgttacttgcatgctgattgcatcaaagtatgaagagatttgtgctcctcgggtggaagaattttgcttcatcacagataatacgtacacaaaagcagaggtattgaaaatggagagtgaggttctaaatctgttgcattttcagttatctgttcccaccacaaaaacatttctcaggaggttcatcctagcatcacaatcttcttacaaggtttcatatgttgaactggaatttctggcaaattatttagcagagcttactcttgttgaatacagcttcttgcagtttctaccttccttgatagctgcatctgctgtattactcgccagatggaccctcaaccaatcagagcatccatggaattcaaccatggaacactatacgaattacaaagtgtcagagcttaaaactaccgtccttgcactggcagatttgcaacatgatatgaaaggctgttctctgaattctatacgcgaaaaatataaacagcagaagttcaggagtgtggcaaatttgtctccgaaaccggtgcagtcacttttcaaggctcaagtataaaactgtaaatgatgcatctatgaagactaaatattgactttcagaatttctgatactggaaaggtgtattatctttggttgtaattatttggccattctaattattgttaattcccaatcaccgcctgatcagtagttgtaacttgtaggatggtaccaagctctggtacttctagatcttgtaacatgaaattgttacatcatgatgattgatacaattaaagctgagaattatagtact

SEQ ID NO: 763 - DNA, 1731 bp, Arabidopsis thaliana
  misc_feature: Ceres SEEDLINE ID no.ME08564
  misc_feature: Inplanta Sequence
  misc_feature: Encodes the peptide sequence at SEQ ID NO. 764
actcttccgtttcgagctctctctcacacacattgaatttcaaggtcgcgacgcgaaatatgagctctgaataacaaacaaacagagttggtgtcgatatcaaggcatgagagatggttagagaaaatgctgtaatgggtggtgccagtgaagagcgtggtgttcgggtcactcgagcaatggctagagctgttttgggtggggtctctgcctcttctagaccgtccttcaagaagcaacacaagaacaacaagggtttcggtagggtagcactagcagatgtcactaacataagcaagaaagggtgtgctacatcaaaatctcaggcaagaggaggttacaagaagactaacacaaagggagcttccaatgtctccattcaagttttgtcaactcaagaagatgttagagcaaaattagcaaaagatttaccctcaatatcaatggtacagtcacatgacgctaatgtagctgaaaggcaggaaggcacagaggtagtgcaaccttctatgtctgttatggcaggtcctctgctttcaatgcaggactctatgaagtctgatgaaatccttcgctctccaaacaaagacgttgatatgatgattactgagaaactaaaactttcagatggtttggacattgtggacattgattcagtggagttaaaggatcctcaagtttggagttcatatgcccctgatatatacaatagtatatttgtcagggagtttgaaaggagaccgtcaagtgattacatggatatgttgcagcaagatatcactccaagcatgcgagggattctgattgattggcttgtggaggtttctgaggaatataagctacttccagatactctttaccttacagtgaatctgattgatcggtctctttctcaaagtttggttcagaaacaaaggctccagttgctgggtgttacttgcatgctgattgcatcaaagtatgaagagatttgtgctcctcgggtggaagaattttgcttcatcacagataatacgtacacaaaagcagaggtattgaaaatggagagtgaggttctaaatctgttgcattttcagttatctgttcccaccacaaaaacatttctcaggaggttcatcctagcatcacaatcttcttacaaggtttcatatgttgaactggaatttctggcaaattatttagcagagcttactcttgttgaatacagcttcttgcagtttctaccttccttgatagctgcatctgctgtattactcgccagatggaccctcaaccaatcagagcatccatggaattcaaccatggaacactatacgaattacaaagtgtcagagcttaaaactaccgtccttgcactggcagatttgcaacatgatatgaaaggctgttctctgaattctatacgcgaaaaatataaacagcagaagttcaggagtgtggcaaatttgtctccgaaaccggtgcagtcacttttcaaggctcaagtataaaactgtaaatgatgcatctatgaagactaaatattgactttcagaatttctgatactggaaaggtgtattatctttggttgtaattatttggccattctaattattgttaattcccaatcaccgcctgatcagtagttgtaacttgtaggatggtaccaagctctggtacttctagatcttgtaacatgaaattgttacatcatgatgattgatacaattaaagctgagaattatagtact

SEQ ID NO: 764 - protein, 458 aa, Arabidopsis thaliana
  misc_feature: Ceres SEEDLINE ID no.ME08564
  misc_feature: Bit score of 1146.3 for HMM based on sequences of FIGURE 9.
  misc_feature (196)..(323): Pfam Name: Cyclin_N Pfam Description: Cyclin, N-terminal domain
  misc_feature (325)..(452): Pfam Name: Cyclin_C Pfam Description: Cyclin, C-terminal domain
MVRENAVMGGASEERGVRVTRAMARAVLGGVSASSRPSFKKQHKNNKGFGRVALADVTNISKKGCATSKSQARGGYKKTNTKGASNVSIQVLSTQEDVRAKLAKDLPSISMVQSHDANVAERQEGTEVVQPSMSVMAGPLLSMQDSMKSDEILRSPNKDVDMMITEKLKLSDGLDIVDIDSVELKDPQVWSSYAPDIYNSIFVREFERRPSSDYMDMLQQDITPSMRGILIDWLVEVSEEYKLLPDTLYLTVNLIDRSLSQSLVQKQRLQLLGVTCMLIASKYEEICAPRVEEFCFITDNTYTKAEVLKMESEVLNLLHFQLSVPTTKTFLRRFILASQSSYKVSYVELEFLANYLAELTLVEYSFLQFLPSLIAASAVLLARWTLNQSEHPWNSTMEHYTNYKVSELKTTVLALADLQHDMKGCSLNSIREKYKQQKFRSVANLSPKPVQSLFKAQV

SEQ ID NO: 765 - protein, 274 aa, Picea abies
  misc_feature: Public GI ID no.12583565
  misc_feature: Bit score of 280.4 for HMM based on sequences of FIGURE 9.
  misc_feature (163)..(265): Pfam Name: Cyclin_C Pfam Description: Cyclin, C-terminal domain
  misc_feature (8)..(135): Pfam Name: Cyclin_N Pfam Description: Cyclin, N-terminal domain
  misc_feature: Functional Homolog Of Ceres SEEDLINE ID no. ME08564 at SEQ ID NO. 764
MCTAYVTDIYANMRVVELKRRPLPNFMETIQRDINANMRSVLIDWLVEVSEEYKLVPDTLYLTISYIDRFLSANVVNRQRLQLLGVSCMLVASKYEEICAPPVEEFCYITDNTYKKEEVLDMEINVLNRLQYDLTNTKPLRPFSGVSFEQLKHPVRFQACIWEFMGNYLAELTLVEYDFLKYLPSLIAAAAVFLARMTLDPMVHPWNSTLQHYTGYKVSDMRDCICAIHDLQLNRKGCTLAAIRDKYNQPKFKCVANLFPPPVISPQFFIDNEV

SEQ ID NO: 766 - protein, 502 aa, Zea mays
  misc_feature: Public GI ID no.1399510
  misc_feature: Bit score of 456.7 for HMM based on sequences of FIGURE 9.
  misc_feature (237)..(364): Pfam Name: Cyclin_N Pfam Description: Cyclin, N-terminal domain
  misc_feature (366)..(493): Pfam Name: Cyclin_C Pfam Description: Cyclin, C-terminal domain
  misc_feature: Functional Homolog Of Ceres SEEDLINE ID no. ME08564 at SEQ ID NO. 764
MSTHAASRRSSSSSAVAKRPAIAEGATKAAGPGPTAAQAKKRTALVNITNVAAPGARVAAVGKVAPPVTGAKLNPATSGAPLKKPSLANARTIRGSAAKSASIKPAPPVSRHDSSSEQKHNVPVPTTVHVPSRAPALVPYSSFVSPGRSGDSVSTDETMSTCDSMKSPDFEYIDNGGCSMLASLQRRADEHLRTSEDRDVEENKWKKNGPAPMEIDSICEVDSNFEDPQLCAALASDIYMHLREAEMKKRPSTDFMETIQKDVNPSMRAILIDWLVEVAEEYRLAPDTLYLTVNYIDRYLSGNEINRQRLQLLGVACMLIAAKYEEICAPQVEEFCYITDNTYFRDEVLEMEASVLNYLKFEMTAPTAKCFLRRFARSAQACDEDPALHLEFLANYIAELSLLEYSLLSYPPSLIAASAIFLARFVLQPTKYPWNSTLAHYTQYKPSELSECVKALHRLSSVGPGSNLPAIREKYSQHKYKFVAKKQSPPQIPAEFFRDAAC

SEQ ID NO: 767 - protein, 347 aa, Zea mays
  misc_feature: Public GI ID no.516550
  misc_feature: Bit score of 359.0 for HMM based on sequences of FIGURE 9.
  misc_feature (208)..(335): Pfam Name: Cyclin_C Pfam Description: Cyclin, C-terminal domain
  misc_feature (79)..(206): Pfam Name: Cyclin_N Pfam Description: Cyclin, N-terminal domain
  misc_feature: Functional Homolog Of Ceres SEEDLINE ID no. ME08564 at SEQ ID NO. 764
MSTCDSMKSPDFEYVDNQDTSMLASLQRRTSEHLRISEDRDVEENKRKKNAVAPMEIDRICDVDSEYEDPQLCATLASDIYMHLREAETKKRPSTDFMEMIQKDVNPSMRAILIDWLVEVAEEYRLVPDTLYLTVNYIDRYLSGNEIRRKRLQLLGVACMLIAAKYEEICAPQVEEFCYITDNTYFRDEVLDMEASVLNYLKFEMTAPTAKCFLRRFARAAQACDEDPALHLEFLANYIAELSLLEYSLLSYPPSLIAASAIFLARFILQPTKYPWNSTLAHYTQYKPSKLSECVKALHRLCSVGSGSNLPAIREKYSQHKYKFVAKKQCPPQIPSLEFFRDATCLD

SEQ ID NO: 768 - DNA, 1826 bp, Glycine max
  misc_feature: Ceres CLONE ID no.541501
  misc_feature: Encodes the peptide sequence at SEQ ID NO. 769
attcatttctctctctcccaaagaagtgtcgaaaacaaagaagcaaacgaaactaaagcactaaagacagtaacgctgtcttccttgcttcgttcttgaataagagagaattcaaaatgtcgacccagaatcgtcgttcgtcgttttcgtcctcaacgacgtcgtccttggccaaacgccatgtatccgcctcaacgacgtcgtcgtctttggccgctcctgcaaacatggccaagaagcgtcctcctctctccaacctcaccaacaccgttgctcaccgcaactcttcctctttggttccatgcgcagctaaatttgccaagaccaagaaagaggttgttccggcgtgttcagggaacaaaagaccaacattggcgaatgttaaacccactagcgcagctatttttccgaaggctaattctttccctgtaagggatgaagctcctcctccggttgccaccgttactgttccggctccggtggtggatgtttcacctagtaaatcagatgcaatgtcggtttctatggatgagtcaatgtcttcttgtgactccttcaagagccctgacattgaatatgtggacaacatcgatgttgcagccgttgattcaattgagaggaaaacattcagcaatctcaacatctctgattctacagaagggaacatttgtagtagagacatacttgttgagttggagaagggagaaaattttgtcaatgttgataataattacgcggatcctcagctctgtgcaacctttgcttgtgatatctacaagcaccttcgtgcatctgaggccaagaaaaggccttccacagacttcatggagagaattcagaaggagataaaccccagcatgcgtgctatattgattgactggcttgtggaggtggctgaagagtatagactagtacctgatacattgtatttgacagtaaactacattgatcggtatctttcagggaatgtgatgaacagacagaggttacaattacttggtgttgcctccatgatgattgcctctaaatacgaggaaatttgtgcgcctcaggtggaggaattttgttacataactgataacacatacttcaaagaagaggttttgcagatggaatctgctgtcttgaattttctcaagtttgaaatgacagccccaacagtaaaatgtttcttgagaagatttgtacgtgcagctcaaggagtcgatgaggtcccttccctacaactagagtgcttgacaaactatattgccgaattgtctctcatggagtacagtatgcttggttatgctccatcacttatagccgcttctgcaattttcctggccaaattcatacttttcccttcaaagaaaccatggacttccacattacagcattacacgttgtacaagccttctgatctgtgtgtttgcgtgagggatcttcaccgtctttgttgtaacagccccaattctaatttgcctgcaattagggagaaatacagtcagcacaagtacaaatatgtggccaagaagtactgccctccttcaatacccccagaatttttccagaattgagcagagatgacagtctaatttttggttgggataggcttagattgatataacttcttgtctccagagaagatgcttctcttacactgtacaatgtagtagccaaccaacccttccatctcaattagaattcttgtatctgcttttattgacgtgcatactcttatgcccacaaattcacaaaaaaataacgcttcaagaagcaacttgtattattagctaagctactgcttcagtagcatcattaatggctaaaaggagccaacgcct

SEQ ID NO: 769 - protein, 480 aa, Glycine max
  misc_feature: Ceres CLONE ID no.541501
  misc_feature: Bit score of 451.4 for HMM based on sequences of FIGURE 9.
  misc_feature (218)..(345): Pfam Name: Cyclin_N Pfam Description: Cyclin, N-terminal domain
  misc_feature (347)..(474): Pfam Name: Cyclin_C Pfam Description: Cyclin, C-terminal domain
  misc_feature: Functional Homolog Of Ceres SEEDLINE ID no. ME08564 at SEQ ID NO. 764
MSTQNRRSSFSSSTTSSLAKRHVSASTTSSSLAAPANMAKKRPPLSNLTNTVAHRNSSSLVPCAAKFAKTKKEVVPACSGNKRPTLANVKPTSAAIFPKANSFPVRDEAPPPVATVTVPAPVVDVSPSKSDAMSVSMDESMSSCDSFKSPDIEYVDNIDVAAVDSIERKTFSNLNISDSTEGNICSRDILVELEKGENFVNVDNNYADPQLCATFACDIYKHLRASEAKKRPSTDFMERIQKEINPSMRAILIDWLVEVAEEYRLVPDTLYLTVNYIDRYLSGNVMNRQRLQLLGVASMMIASKYEEICAPQVEEFCYITDNTYFKEEVLQMESAVLNFLKFEMTAPTVKCFLRRFVRAAQGVDEVPSLQLECLTNYIAELSLMEYSMLGYAPSLIAASAIFLAKFILFPSKKPWTSTLQHYTLYKPSDLCVCVRDLHRLCCNSPNSNLPAIREKYSQHKYKYVAKKYCPPSIPPEFFQN

SEQ ID NO: 770 - protein, 484 aa, Glycine max
  misc_feature: Public GI ID no.857397
  misc_feature: Bit score of 450.9 for HMM based on sequences of FIGURE 9.
  misc_feature (222)..(349): Pfam Name: Cyclin_N Pfam Description: Cyclin, N-terminal domain
  misc_feature (351)..(478): Pfam Name: Cyclin_C Pfam Description: Cyclin, C-terminal domain
  misc_feature: Functional Homolog Of Ceres SEEDLINE ID no. ME08564 at SEQ ID NO. 764
MSTQNRRSSFSSSTTSSLAKRHASASTTSSLAAAPTNMAKKRPPLSNLTNTVAHRNSSSSVPCAAKFAKTKKDVVPACSGNKRPTLANVKPASAVIFPKANSFPVKNEAPPTPPPPVATVTVPAPVVDVSPSKSDTMSVSTDESMSSCDSFKSPDIEYVDNSDVAAVDSIERKTFSHLNISDSTEGNICSREILVELEKGDKFVNVDNNYADPQLCATFACDIYKHLRASEAKKRPSTDFMEKIQKEINSSMRAILIDWLVEVAEEYRLVPDTLYLTVNYIDRYLSGNVMNRQRLQLLGVASMMIASKYEEICAPQVEEFCYITDNTYFKEEVLQMESAVLNFLKFEMTAPTVKCFLRRFVRAAQGVDEVPSLQLECLTNYIAELSLMEYSMLGYAPSLVAASAIFLAKFILFPSKKPWNSTLQHYTLYQPSDLCVCVKDLHRLCCNSPNSNLPAIREKYSQHKYKYVAKKYCPPSIPPEFFQN

SEQ ID NO: 771 - protein, 483 aa, Nicotiana tabacum
  misc_feature: Public GI ID no.1064927
  misc_feature: Bit score of 462.0 for HMM based on sequences of FIGURE 9.
  misc_feature (218)..(345): Pfam Name: Cyclin_N Pfam Description: Cyclin, N-terminal domain
  misc_feature (347)..(474): Pfam Name: Cyclin_C Pfam Description: Cyclin, C-terminal domain
  misc_feature: Functional Homolog Of Ceres SEEDLINE ID no. ME08564 at SEQ ID NO. 764
MATTQNRRSSVSSATAKRQAMTANSSLENNNHGKLVAKKRPALTNISNHTTASARNSLSHSSKLAPCTSKAVSIKKSNSNAASSVLPTSSFVKPISKTVSIPRSDAAIPKITAIPLPATCSMDISPSHSDGSLVSMDETMSTSDSLRSPDVEYIDDNQTAAFDSIEKKAFSTLYISEDVKAADICKRDVLVDIESGDKIANIDNNFVDPQLCATMACDIYKHLRATEVKKRPSTDFMEKVQKDINASMRAILIDWLVEVAEEYRLVPDTLYLTVNYIDRYLSGNLMDRQRLQLLGVACMMIASKYEEICAPQVEEFCYITDNTYFKEEVLQMESTVLNYLKFEMTAPTAKCFLRRFVRAAQGLNEVLSLQLEHLASYIAELSLLEYNMLCYAPSVIAASAIFLAKYILLPSKKPWNSTLRHYTLYQPSDLRDCVVALHSLCCNNNNSSLPAIREKYSQHKYKFVAKKYCPPTIPVEFFQNISC

SEQ ID NO: 772 - DNA, 1083 bp, Populus balsamifera subsp. trichocarpa
  misc_feature: Ceres ANNOT ID no.1443786
  misc_feature: Encodes the peptide sequence at SEQ ID NO. 773
atggcagagcaagagaactgcacccgcgttactcgcgctgccaaaaagagggcggctgcgctggcttccacggaggaccaacccttgaataagaagagggttgtgctgggagagcttcccaacttatcaaacgccatcgtttcatcaaacgagccccagaagcagaaagcaaaagcaaagccaaaggcaaggaagggggcttcaacgaagaaggagggtgttctcaaagaggatgttgatgggaaccctgaagatccccaaatgtgtgcaccatatgcatctgatatttatgagtatcttcataaaatggaggtggatccaaaaagaaggccactgcctgattacattgagaaggttcaaaaagatgtgagtcccaatatgagagggattttggtggattggttggtggaggtcgcagaggaatacaagcttgtctctgagaccttgtatcttactgtttcttacgttgacagattcttgtctttcaatgttctcagcaggcagaggcttcagcttcttggtgtttcttctatgcttcttgcctcaaagtatgaagaaatcaaccctccgcatgtggaagatttttgctacattacagataatacatacaccaaggaagaggtggttaaaatggaagctgacatacttaaatctttgaaatttgaaatggggaatcctacgataaagacatttctaaggagattcactagggttgctctagaggactacaaaacttcaaatttgcagcttgagttcctcggattctaccttgctgagttgagcttgttggattacaattgtgtgaaatttttaccttctttggtggctgcttctgttatatttcttacaaggtttctgatgcgacccaagacaaatccttggagttcaaccttgcaacaatacactggatacaaggcagcggatctaagggaatgtgttctcatcatacatgacttgtatttgagtagaagaggaggtggattgcaagctgtaagagaaaaatacaagcagcataagttcaagtgcgtggcaaacatgccttccccgccagagttaccagctttatatttcgaagaggtttaa

SEQ ID NO: 773 - protein, 360 aa, Populus balsamifera subsp. trichocarpa
  misc_feature: Ceres ANNOT ID no.1443786
  misc_feature: Bit score of 385.0 for HMM based on sequences of FIGURE 9.
  misc_feature (226)..(353): Pfam Name: Cyclin_C Pfam Description: Cyclin, C-terminal domain
  misc_feature (95)..(224): Pfam Name: Cyclin_N Pfam Description: Cyclin, N-terminal domain
  misc_feature: Functional Homolog Of Ceres SEEDLINE ID no. ME08564 at SEQ ID NO. 764
MAEQENCTRVTRAAKKRAAALASTEDQPLNKKRVVLGELPNLSNAIVSSNEPQKQKAKAKPKARKGASTKKEGVLKEDVDGNPEDPQMCAPYASDIYEYLHKMEVDPKRRPLPDYIEKVQKDVSPNMRGILVDWLVEVAEEYKLVSETLYLTVSYVDRFLSFNVLSRQRLQLLGVSSMLLASKYEEINPPHVEDFCYITDNTYTKEEVVKMEADILKSLKFEMGNPTIKTFLRRFTRVALEDYKTSNLQLEFLGFYLAELSLLDYNCVKFLPSLVAASVIFLTRFLMRPKTNPWSSTLQQYTGYKAADLRECVLIIHDLYLSRRGGGLQAVREKYKQHKFKCVANMPSPPELPALYFEEV

SEQ ID NO: 774 - protein, 483 aa, Nicotiana tabacum
  misc_feature: Public GI ID no.849070
  misc_feature: Bit score of 460.7 for HMM based on sequences of FIGURE 9.
  misc_feature (218)..(345): Pfam Name: Cyclin_N Pfam Description: Cyclin, N-terminal domain
  misc_feature (347)..(474): Pfam Name: Cyclin_C Pfam Description: Cyclin, C-terminal domain
  misc_feature: Functional Homolog Of Ceres SEEDLINE ID no. ME08564 at SEQ ID NO. 764
MATTQNRRSSVSSATTKRQAMTSNSSLENNNHGKLVAKKRPALTNISNHTTASARNSLSHSSKLAPCTSKAVSIKKSNSNAASSVLPTSSFVKPISKTVSIPRSDAAIPKITAIPLPATCSMDISPSHSDGSLVSMDETMSTSDSLRSPDVEYIDDNQTAAFDSIEKKAFSTLYISEDVKAADICKRDVLVDIESGDKIANIDNNFVDPQLCATMACDIYKHLRATEVKKRPSTDFMEKVQKDINASMRAILIDWLVEVAEEYRLVPDTLYLTVNYIDRYLSGNLMDRQRLQLLGVACMMIASKYEEICAPQVEEFCYITDNTYFKEEVLQMESTVLNYLKFEMTAPTAKCFLRRFVRAAQGLNEVLSLQLEHLASYIAELSLLEYNMLCYAPSVIAASAIFLAKYILLPSKKPWNSTLRHYTLYQPSDLRDCVVALHSLCCNNNNSSLPAIREKYSQHKYKFVAKKYCPPTIPVEFFQNISC

SEQ ID NO: 775 - protein, 496 aa, Scutellaria baicalensis
  misc_feature: Public GI ID no.70568819
  misc_feature: Bit score of 465.4 for HMM based on sequences of FIGURE 9.
  misc_feature (231)..(358): Pfam Name: Cyclin_N Pfam Description: Cyclin, N-terminal domain
  misc_feature (360)..(487): Pfam Name: Cyclin_C Pfam Description: Cyclin, C-terminal domain
  misc_feature: Functional Homolog Of Ceres SEEDLINE ID no. ME08564 at SEQ ID NO. 764
MASSAGVRRPTTSSLAKRHASSASDNVGKVASSASASKKRPALANVTNQRHGTGSANAGRAPLPESSKIAPCTTKIVSIKKGPSASTNSGFPGAILPTSSSVKQNIVAVGRSTFIPKSDVVLPKTLAAPVSCSMDVSPDKSDSLSVSMDESMSTCDSLKSPDVEHVDYIDVAAVDSIERKASNMLCISDHMEIAGNLCKRDALASLESGDKIVDVDENLDDPQLCATIACDIYKHLRASEAKKRPATNFMERVQKDINASMRAILIDWLVEVAEEYRLVPDTLYLTVNYIDRYLSGNVMDRQRLQLLGIACMMIASKYEEICAPQVEEFCYITDNTYFKDEVLEMESAVLNYLKFEMTAPTAKCFLRRFVRAAQGVNETPLLQFECLANYITELSLLEYSMLCFAPSLIAAASIFLARFILLPSKRPWNHTLRHYTLYQPYDLRDCVLALHGFCCNSHNSSLPAIREKYSQHKYKFVAKKYCPLSIPPEYFHNVSS

SEQ ID NO: 776 - protein, 482 aa, Nicotiana tabacum
  misc_feature: Public GI ID no.1064929
  misc_feature: Bit score of 465.8 for HMM based on sequences of FIGURE 9.
  misc_feature (217)..(344): Pfam Name: Cyclin_N Pfam Description: Cyclin, N-terminal domain
  misc_feature (346)..(473): Pfam Name: Cyclin_C Pfam Description: Cyclin, C-terminal domain
  misc_feature: Functional Homolog Of Ceres SEEDLINE ID no. ME08564 at SEQ ID NO. 764
MATTQNRRNSVSSAVAKRQAMAENNHGKLPAGGAKKRPALTNISNHTTASARNSLSHSSKLAPCTSKVVSIKKNNSNAASSVLPTSSSFVKPISKTVSLPRSDAAVPKITAIPPLPSTCSMDISPSHSDGSLVSMDETMSTSNSLRSPDVEYIDDNQTAAFDSIEKKAFSTLYISEDVKAADICKRDVLVDMESGDKIANIDNNLVDPQLCATMACDIYKHLRATEVKKRPSTDFMEKVQKDINASMRAILIDWLVEVAEEYRLVPDTLYLTVNYIDRYLSGNLMDRQRLQLLGVACMMIASKYEEICAPQVEEFCYITDNTYFKEEVLQMESTVLNYLKFEMTAPTAKCFLRRFVRAAQGLNEVLSLQLEHLASYIAELSLLEYNMLCYAPSVIAASAIFLAKYILLPSKKPWNSTLRHYTLYQPSDLRDCVMALHSLCCNNNNSSLPAIREKYSQHKYKFVAKKYCPPTIPVEFFQNISC

SEQ ID NO: 777 - protein, 487 aa, Silene latifolia
  misc_feature: Public GI ID no.28208266
  misc_feature: Bit score of 446.7 for HMM based on sequences of FIGURE 9.
  misc_feature (223)..(350): Pfam Name: Cyclin_N Pfam Description: Cyclin, N-terminal domain
  misc_feature (352)..(478): Pfam Name: Cyclin_C Pfam Description: Cyclin, C-terminal domain
  misc_feature: Functional Homolog Of Ceres SEEDLINE ID no. ME08564 at SEQ ID NO. 764
MSTQAHRNRLLGTENGNGGGGVKVVNNPKLTKKRPPLSNLTNHPRPSLVPSAITKSTKAKRDSSTGVRSTSFPAENPSATLNSKPSAVVPLKTAFTRSNVLVSCKASLPNGKGEQSHITRHPASCTMDTTPTPEDAQSVSMDESMSTCDSLKSPEVEYMDENDVAALCSIERKTSKNLYISDDMETTGSFCKREIVSAMEIDKVVDVDDNHMDPQFCSTIACDIYKHLRESETQKRPSTDFMEQTQKDINASMRAILVDWLVEVAEEYRLVPDTLYLTVNYIDRYLSGNAMNRQRLQLLGVACMMIAAKYEEICAPQVEEFCYITDNTYFKEEVLQMESGVLNFLKFEMTAPTTKNFLRRFVRAAQVMNEVPAFQLECLANYVAELSLLEYSMLKYAPSLIAASSVFLAKYMLTSSRPWNATLRHYTLYEASDLEECVKALHQLCLNSHISSLPAIREKYSHHKYKSVAKKHCPSSIPAEYFQNSSC

SEQ ID NO: 778 - DNA, 1919 bp, Panicum virgatum
  misc_feature: Ceres CLONE ID no.1878113
  misc_feature: Encodes the peptide sequence at SEQ ID NO. 779
atcctcctcctctcttgtatttctccccctctaggctccctccctccctccctccccaaaccccctcgccgctcctgtcgggacgccccaaacccctagccctaagcccgacgaggaggatgtcgaccatcgccgcctcccgccgcgcctcctccgccaccgccaagcgccccgccatggccgagagcgccggggggcccaaggcggcgagcgccgccgccgcgcaggccaagaagcgcgtcgcgcttggcaacatcaccaacgtcgccgttgccgcgcaagcgggcagggccgccgggaagctcgcgccaccgccggccagcgcgaagttgaattcagttacctcagctgcacccttgaagaagccatcattggcaagtgctcgcagtgtgagctccgttcggggtcctgatttgaaatcagcttcaatcaagccagctccacccctttctcgccatgacagcacgacgcagaaccataatgttcctcttcctaaagtgcctaccgttctccaggcgcccagtcgcatacctgctttggttccctgcaacacctttgtgtctcctggaccctctggagactcggtttctgtcgatgagacaatgtcgacttgtgactccatgaaaagcccagactttgagtacatagacaatgaggactcctcaatgctcgcctcattgcagcgacgcgcaaatgaacacctacgtatctcagatgatagagatgttgaagaaaataagtggaagaaaaatgcctctgccccaatgaaaattgaccgcatttgtgatgttgacaatgacttagaggatccacagttgtgcgctactctggcttctgacatttacatgcatatgcgagaggctgagacgaagaaaagaccatctactgatttcatggaaacaattcaaaaggatgtcaacccaagcatgagggcaattttgatagactggcttgttgaagttgctgaagaatatcgtcttgtccctgatactctgtacctgacagttaactacattgaccgttatctttctggcaacgaaatcaaccgccaaaggctgcaattacttggtgttgcttgcatgcttatagctgcaaaatacgaggagatatgtgcaccacaagtagaagaattctgctacataactgacaacacttacttcagagatgaggttttggaaatggaagcttctgtactgaattacttgaagtttgaaatgaccgcaccaacagcgaaatgctttttgaggagatttgctcgtgctgcacaagcgtgtgatgaggatccagctctgcatcttgagtttctggccaattacatcgctgagctatcactccttgagtacagcctactctcataccctccatcgctaatagctgcctcagctattttcttggcaaagtttgtactccagccaacaaagtatccttggaattctacccttgctcactgcacacaatacaagccgtcggaattgtgcgattgcgtaaaggcattgcaccgcttattcggtgttagtcctgggagcaaccttcctgctatcagagaaaagtacagtcaacataagtacaaatttgtggcaaagaagcactgtccaacattgattcccaccgaattcttccgagatgtggtgtgctaggcttagaagaagcccaggagtagttccagttgcttactgaattcttgctcttgtggctgaaatgcccagtagcacccgcactgactgtgcaggtggttagttgatgcaggaggttggtgatgcccccctgttgtttcaggggattagaagagtgtagattctagattgaggctttgaagtttgtggccatgtattcctgtcctgcttcctgctgtaatcttcctgtatctagacccatgtttgcaggtgcatgtaaattggagttctgtagaagtagatgat

SEQ ID NO: 779 - protein, 505 aa, Panicum virgatum
  misc_feature: Ceres CLONE ID no.1878113
  misc_feature: Bit score of 459.0 for HMM based on sequences of FIGURE 9.
  misc_feature (240)..(367): Pfam Name: Cyclin_N Pfam Description: Cyclin, N-terminal domain
  misc_feature (369)..(496): Pfam Name: Cyclin_C Pfam Description: Cyclin, C-terminal domain
  misc_feature: Functional Homolog Of Ceres SEEDLINE ID no. ME08564 at SEQ ID NO. 764
MSTIAASRRASSATAKRPAMAESAGGPKAASAAAAQAKKRVALGNITNVAVAAQAGRAAGKLAPPPASAKLNSVTSAAPLKKPSLASARSVSSVRGPDLKSASIKPAPPLSRHDSTTQNHNVPLPKVPTVLQAPSRIPALVPCNTFVSPGPSGDSVSVDETMSTCDSMKSPDFEYIDNEDSSMLASLQRRANEHLRISDDRDVEENKWKKNASAPMKIDRICDVDNDLEDPQLCATLASDIYMHMREAETKKRPSTDFMETIQKDVNPSMRAILIDWLVEVAEEYRLVPDTLYLTVNYIDRYLSGNEINRQRLQLLGVACMLIAAKYEEICAPQVEEFCYITDNTYFRDEVLEMEASVLNYLKFEMTAPTAKCFLRRFARAAQACDEDPALHLEFLANYIAELSLLEYSLLSYPPSLIAASAIFLAKFVLQPTKYPWNSTLAHCTQYKPSELCDCVKALHRLFGVSPGSNLPAIREKYSQHKYKFVAKKHCPTLIPTEFFRDVVC

SEQ ID NO: 780 - protein, 372 aa, Catharanthus roseus
  misc_feature: Public GI ID no.2190259
  misc_feature: Bit score of 399.5 for HMM based on sequences of FIGURE 9.
  misc_feature (107)..(236): Pfam Name: Cyclin_N Pfam Description: Cyclin, N-terminal domain
  misc_feature (238)..(365): Pfam Name: Cyclin_C Pfam Description: Cyclin, C-terminal domain
  misc_feature: Functional Homolog Of Ceres SEEDLINE ID no. ME08564 at SEQ ID NO. 764
MADKENCIRVTRLAKKRAVEAMAASEQQRPSKKRVVLGELKNLSSNISSIQTYDFSSGPQKQQKNKNKRKAKESLGFEVKEKKVEEAGIDVFSQSDDPQMCGAYVSDIYEYLHKMEMETKRRPLPDYLDKVQKDVTANMRGVLIDWLVEVAEEYKLLPDTLYLTVSYIDRFLSMNALSRQKLQLLGVSSMLIASKYEEISPPHVEDFCYITDNTYKKEEVVKMEADVLKFLKFEMGNPTIKTFLRRLTRVVQDGDKNPNLQFEFLGYYLAELSLLDYGCVKFLPSLIASSVIFLSRFTLQPKVHPWNSLLQHNSGYKPADLKECVLIIHDLQLSKRGSSLVAVRDKYKQHKFKCVSTLTAPPSIPDEFFEDI

SEQ ID NO: 781 - protein, 345 aa, Oryza sativa subsp. japonica
  misc_feature: Public GI ID no.108862534
  misc_feature: Bit score of 366.0 for HMM based on sequences of FIGURE 9.
  misc_feature (209)..(336): Pfam Name: Cyclin_C Pfam Description: Cyclin, C-terminal domain
  misc_feature (80)..(207): Pfam Name: Cyclin_N Pfam Description: Cyclin, N-terminal domain
  misc_feature: Functional Homolog Of Ceres SEEDLINE ID no. ME08564 at SEQ ID NO. 764
MSTCDSMKSPDFEYIDNGDSSSVLGSLQRRANENLRISEDRDVEETKWKKDAPSPMEIDQICDVDNNYEDPQLCATLASDIYMHLREAETRKHPSTDFMETLQKDVNPSMRAILIDWLVEVAEEYRLVPDTLYLTVNYIDRYLSGNEINRQRLQLLGVACMLIAAKYKEICAPQVEEFCYITDNTYFRDEVLEMEASVLNYLKFEMTAPTAKCFLRRFVRVAQVSDEDPALHLEFLANYVAELSLLEYNLLSYPPSLVAASAIFLAKFILQPAKHPWNSTLAHYTQYKSSELSDCVKALHRLFCVGPGSNLPAIREKYTQHKYKFVAKKPCPPSIPTEFFRDSTC

SEQ ID NO: 782 - protein, 442 aa, Arabidopsis thaliana
  misc_feature: Public GI ID no.22330698
  misc_feature: Bit score of 362.3 for HMM based on sequences of FIGURE 9.
  misc_feature (181)..(308): Pfam Name: Cyclin_N Pfam Description: Cyclin, N-terminal domain
  misc_feature (310)..(437): Pfam Name: Cyclin_C Pfam Description: Cyclin, C-terminal domain
  misc_feature: Functional Homolog Of Ceres SEEDLINE ID no. ME08564 at SEQ ID NO. 764
MSSSSRNLSQENPIPRPNLAKTRTSLRDVGNRRAPLGDITNQKNGSRNPSPSSTLVNCSNKIGQSKKAPKPALSRNWNLGILDSGLPPKPNAKSNIIVPYEDTELLQSDDSLLCSSPALSLDASPTQSDPSISTHDSLTNHVVDYMVESTTDDGNDDDDDEIVNIDSDLMDPQLCASFACDIYEHLRVSEVNKRPALDYMERTQSSINASMRSILIDWLVEVAEEYRLSPETLYLAVNYVDRYLTGNAINKQNLQLLGVTCMMIAAKYEEVCVPQVEDFCYITDNTYLRNELLEMESSVLNYLKFELTTPTAKCFLRRFLRAAQGRKEVPSLLSECLACYLTELSLLDYAMLRYAPSLVAASAVFLAQYTLHPSRKPWNATLEHYTSYRAKHMEACVKNLLQLCNEKLSSDVVAIRKKYSQHKYKFAAKKLCPTSLPQELFL

SEQ ID NO: 783 - DNA, 1092 bp, Populus balsamifera subsp. trichocarpa
  misc_feature: Ceres ANNOT ID no.1486570
  misc_feature: Encodes the peptide sequence at SEQ ID NO. 784
atgaattcaatttcagagaaagagaactgtgtccgcattactcgcgctgccaaaaagagggcggcggcgctggcttcagccgaggaccggcccttgaataagaagagggttgtgttgggagaacttcccaacttatcgaacaccaccgtttcagtgaatgaggtacataagcagaaagcaaagacaaagtcaaataccagcaagaggactttaacgaagaaggagggtgttttcaaagaggatgttgatgggaaacctgaagatccccaaatgtgtgcaccatatgcatctgatatttatgagtatcttcataaaatggaggtggatccaaaaagaaggcctttgcctgattacattgagaaggttcaaaaagatgttagccccaatatgagagggattttggtggattggttggttgaggttgcggaggagtacaagattgtctctgacactttgtatcttactgtttcttacattgatagattcttgtctttcaatgttctaaataggcagagacttcagcttcttggtgtttctgctatgctcattgcctcaaagtatgaagaaatcaaccctccaaatgtagaagatttttgctacataacagataatacgtacaccaaggaagaggtggttaaaatggaagctgatatacttaaatctttgaaatttgaagtgggaaatcctacaataaagacactcttaaggagattcacaagggcagcacaagaggattacaaaacttcggatttgcagtttgagttcctgggattttaccttgccgagttgagcttgttggattacaattgtgtgaaatatctaccttctttggtggctgcttctgttatttttcttacaagatttctgatgcgacccaagacacatccttggagttcaaccttgcaacaatacactggatacaaagcaacggatctaaaggattgtgttctcatcatacatgacttgtatttgagtagaagagggggtgggttacaagctgtaagagaaaaatataagcagcataagttcaagtgcgtggcgaacatgccttcccctccagagataccagctttatattttgacgatgtttaa

SEQ ID NO: 784 - protein, 363 aa, Populus balsamifera subsp. trichocarpa
  misc_feature: Ceres ANNOT ID no.1486570
  misc_feature: Bit score of 390.2 for HMM based on sequences of FIGURE 9.
  misc_feature (229)..(356): Pfam Name: Cyclin_C Pfam Description: Cyclin, C-terminal domain
  misc_feature (98)..(227): Pfam Name: Cyclin_N Pfam Description: Cyclin, N-terminal domain
  misc_feature: Functional Homolog Of Ceres SEEDLINE ID no. ME08564 at SEQ ID NO. 764
MNSISEKENCVRITRAAKKRAAALASAEDRPLNKKRVVLGELPNLSNTTVSVNEVHKQKAKTKSNTSKRTLTKKEGVFKEDVDGKPEDPQMCAPYASDIYEYLHKMEVDPKRRPLPDYIEKVQKDVSPNMRGILVDWLVEVAEEYKIVSDTLYLTVSYIDRFLSFNVLNRQRLQLLGVSAMLIASKYEEINPPNVEDFCYITDNTYTKEEVVKMEADILKSLKFEVGNPTIKTLLRRFTRAAQEDYKTSDLQFEFLGFYLAELSLLDYNCVKYLPSLVAASVIFLTRFLMRPKTHPWSSTLQQYTGYKATDLKDCVLIIHDLYLSRRGGGLQAVREKYKQHKFKCVANMPSPPEIPALYFDDV

SEQ ID NO: 785 - protein, 355 aa, Arabidopsis thaliana
  misc_feature: Public GI ID no.15239172
  misc_feature: Bit score of 342.8 for HMM based on sequences of FIGURE 9.
  misc_feature (219)..(346): Pfam Name: Cyclin_C Pfam Description: Cyclin, C-terminal domain
  misc_feature (90)..(217): Pfam Name: Cyclin_N Pfam Description: Cyclin, N-terminal domain
  misc_feature: Functional Homolog Of Ceres SEEDLINE ID no. ME08564 at SEQ ID NO. 764
MADEKENCVRMTRAATKRKASMEAAIDKERINKKRVVLGELPNLSNIKKSRKATTKQKKKSVSIPTIETLNSDIDTRSDDPQMCGPYVTSIFEYLRQLEVKSRPLVDYIEKIQKDVTSNMRGVLVDWLVEVAEEYKLLSDTLYLAVSYIDRFLSLKTVNKQRLQLLGVTSMLIASKYEEITPPNVDDFCYITDNTYTKQEIVKMEADILLALQFELGNPTSNTFLRRFTRVAQEDFEMSHLQMEFLCSYLSELSMLDYQSVKFLPSTVAASAVFLARFIIRPKQHPWNVMLEEYTRYKAGDLKECVAMIHDLYLSRKCGALEAIREKYKQHKFKCVATMPVSPELPLTVFEDVNI

SEQ ID NO: 786 - protein, 384 aa, Nicotiana tabacum
  misc_feature: Public GI ID no.1064931
  misc_feature: Bit score of 401.6 for HMM based on sequences of FIGURE 9.
  misc_feature (116)..(245): Pfam Name: Cyclin_N Pfam Description: Cyclin, N-terminal domain
  misc_feature (247)..(374): Pfam Name: Cyclin_C Pfam Description: Cyclin, C-terminal domain
  misc_feature: Functional Homolog Of Ceres SEEDLINE ID no. ME08564 at SEQ ID NO. 764
MKKQEKEAIMADLENCGRVTRLAKKRAAEAMASHQQQHPSKKRVVLGEIQNFSNLGVSQIKGLNTEPKKQPKSKQQQSKRKLKRAVTSKIDKEELNVDNVDANYDDPQMCSAYVSDIYDYLRKMEIEEKRRPLPDYLEKVQKDLSPNMRGVLVDWLVEVAEEYKLLSDTLYLAVSYIDRFLSTNVITRQKLQLLGVSSMLISAKYEEISPPHVEDFCYITDNTYTKEEVVKMEADVLKTLNFEMGNPTVKTFLRRFTGVAQEDYKTPNLQLEFLGYYLAELSILDYSCVKYVPSLLAAAVVFLSRFTLQPNTHPWSLALQQYSGYKAADLKECILILHDLQLSRRGGSLAAVRDKYKQHKFKCVSSLTSPVEIPASFFEDMRQL

SEQ ID NO: 787 - DNA, 1868 bp, Zea mays
  misc_feature: Ceres CLONE ID no.1390716
  misc_feature: Encodes the peptide sequence at SEQ ID NO. 788
aaaaaaaaactggtcccctccgccctccgccgtaccaccgcgcctccgcatttcgcatcaagccagagcgggggcagaggcgcctctcccgccggagacccgagcgagaaccgccgcttccccctccttctcctcattttgaaatcgcgttttggcggcctatctcctccgcaccgcgcaccatctctcctccgctgcaacgctacttaaccgcctcgatttgctccccatttccccgtccagcctagatagacctgagccgaaaccctaggaccccgcgcctccgcttccgcttccccctctcccgcagctgacgaggccgacgatgggggacaaggagaacgcacctcccttgggggcccggggcgcggcggcgccccggctcacgcgggccgcggccaagcgagctgcggcggcggcggcggcggcggagggtccgggcgacgccaagcggcggcgggtggcgctcggggagctcccggcgctcgccaacaacgccggcctccgcgcgccgtcctgccccgtcaagccctcgaagcctgcgtccaggcccgggaggcacgcgaggaatgttgcgccggaggcccgcgggccctcctccgcccacgaggccgagcgctgcgcgtcctccccgccgcgcaccgccgacgccgacgccgagtctaactccgtctccaaccccgcgccgcgcgccaccgcctacgccgactcctgcgcttcctcctcgccgccgcgcgccgccgccgccggggcgcccgccgacccccagctctgcgggtcctacgcctccgacatctacacctacctccgctccctggaggtggagccgcagcggcggtccagacccgattacatcgaggcggtgcaggcggacgttacggcgcacatgcgcggcatcctcgtcgactggctggtcgaggtcgccgaggagtataagctcgtcgccgacaccctgtacctcgccatctcctatgtggatcgcttcctctccgtcaatgcgctcggccgcgacaagctgcagctccttggcgtcgcctccatgctcattgctgcgaagtatgaggagatcagcccgccgcacccggaggacttttgctacatcacagacaacacctacaccaaagaggagctcctcaagatggagagcgatatactcaagcttctcaagttcgagttgggcaatcctaccattaagaccttcctgaggcggttcacaagatctgcccatgaagacaagaagcgctccatcttgttaatggaattcttggggagctacctggctgagttgagtctactggattatggctgtctccgattcttgccatcagtagttgctgcttcagttatgttcgttgctaggctgaccattgatccaaatgccaatccttggaacatgaagctgcagaagacgacaggctacaaagtttctgaactcaaggattgcatcgtagccatacgtgacttgcagctcaacaggaaatttccatcattaacggcaattcgagacaagtacaagcaacacaagttcaaatgtgtgtcaacgcttcttccccctgttgtggtccctacttcatactttgaagacttagctgagtagctgctcttggactgcaccactgtgaggctaacaatctgagctctccttgagctcttagggacgggagaataactgtgttatgagcttcttctcagttaagtagggttccaaaagctatttaagtgaggttctttaggaatcgcagctgagttactagtagtgaggccaggcattctcttgttttgtgaattgtattctttgtatgatatcctagtcacatcttgcctgttgcccacaatgtaatgtttgatacgttagacctttccgtctc

SEQ ID NO: 788 - protein, 423 aa, Zea mays
  misc_feature: Ceres CLONE ID no.1390716
  misc_feature: Bit score of 385.4 for HMM based on sequences of FIGURE 9.
  misc_feature (156)..(285): Pfam Name: Cyclin_N Pfam Description: Cyclin, N-terminal domain
  misc_feature (287)..(414): Pfam Name: Cyclin_C Pfam Description: Cyclin, C-terminal domain
  misc_feature: Functional Homolog Of Ceres SEEDLINE ID no. ME08564 at SEQ ID NO. 764
MGDKENAPPLGARGAAAPRLTRAAAKRAAAAAAAAEGPGDAKRRRVALGELPALANNAGLRAPSCPVKPSKPASRPGRHARNVAPEARGPSSAHEAERCASSPPRTADADAESNSVSNPAPRATAYADSCASSSPPRAAAAGAPADPQLCGSYASDIYTYLRSLEVEPQRRSRPDYIEAVQADVTAHMRGILVDWLVEVAEEYKLVADTLYLAISYVDRFLSVNALGRDKLQLLGVASMLIAAKYEEISPPHPEDFCYITDNTYTKEELLKMESDILKLLKFELGNPTIKTFLRRFTRSAHEDKKRSILLMEFLGSYLAELSLLDYGCLRFLPSVVAASVMFVARLTIDPNANPWNMKLQKTTGYKVSELKDCIVAIRDLQLNRKFPSLTAIRDKYKQHKFKCVSTLLPPVVVPTSYFEDLAE

SEQ ID NO: 789 - DNA, 1077 bp, Populus balsamifera subsp. trichocarpa
  misc_feature: Ceres ANNOT ID no.1539981
  misc_feature: Encodes the peptide sequence at SEQ ID NO. 790
atgaattcaatttcagagaaagagaactgtgtccgcattactcgcgctgccaaaaagagggcggcggcgctggcttcagccgaggaccggcccttgaataagaagagggttgtgttgggagaacttcccaacttatcgaacaccaccgtttcagtgaatgaggtacataagcagaaagcaaagacaaagtcaaataccagcaagaggactttaacgaagaaggagggtgttttcaaagaggatgttgatgggaaacctgaagatccccaaatgtgtgcaccatatgcatctgatatttatgagtatcttcataaaatggaggtggatccaaaaagaaggcctttgcctgattacattgagaaggttcaaaaagatgttagccccaatatgagagggattttggtggattggttggttgaggttgcggaggagtacaagattgtctctgacactttgtatcttactgtttcttacattgatagattcttgtctttcaatgttctaaataggcagagacttcagcttcttggtgtttctgctatgctcattgcctcaaagtatgaagaaatcaaccctccaaatgtagaagatttttgctacataacagataatacgtacaccaaggaagaggtggttaaaatggaagctgatatacttaaatctttgaaatttgaagtgggaaatcctacaataaagacactcttaaggagattcacaagggcagcacaagaggattacaaatttgagttcctgggattttaccttgccgagttgagcttgttggattacaattgtgtgaaatatctaccttctttggtggctgcttctgttatttttcttacaagatttctgatgcgacccaagacacatccttggagttcaaccttgcaacaatacactggatacaaagcaacggatctaaaggattgtgttctcatcatacatgacttgtatttgagtagaagagggggtgggttacaagctgtaagagaaaaatataagcagcataagttcaagtgcgtggcgaacatgccttcccctccagagataccagctttatattttgacgatgtttaa

SEQ ID NO: 790 - protein, 358 aa, Populus balsamifera subsp. trichocarpa
  misc_feature: Ceres ANNOT ID no.1539981
  misc_feature: Bit score of 380.8 for HMM based on sequences of FIGURE 9.
  misc_feature (229)..(351): Pfam Name: Cyclin_C Pfam Description: Cyclin, C-terminal domain
  misc_feature (98)..(227): Pfam Name: Cyclin_N Pfam Description: Cyclin, N-terminal domain
  misc_feature: Functional Homolog Of Ceres SEEDLINE ID no. ME08564 at SEQ ID NO. 764
MNSISEKENCVRITRAAKKRAAALASAEDRPLNKKRVVLGELPNLSNTTVSVNEVHKQKAKTKSNTSKRTLTKKEGVFKEDVDGKPEDPQMCAPYASDIYEYLHKMEVDPKRRPLPDYIEKVQKDVSPNMRGILVDWLVEVAEEYKIVSDTLYLTVSYIDRFLSFNVLNRQRLQLLGVSAMLIASKYEEINPPNVEDFCYITDNTYTKEEVVKMEADILKSLKFEVGNPTIKTLLRRFTRAAQEDYKFEFLGFYLAELSLLDYNCVKYLPSLVAASVIFLTRFLMRPKTHPWSSTLQQYTGYKATDLKDCVLIIHDLYLSRRGGGLQAVREKYKQHKFKCVANMPSPPEIPALYFDDV

SEQ ID NO: 791 - DNA, 1482 bp, Populus balsamifera subsp. trichocarpa
  misc_feature: Ceres ANNOT ID no.1452143
  misc_feature: Encodes the peptide sequence at SEQ ID NO. 792
atgtcgacgcagacacgccgttcgtcgttttcctcttcaacgtcgtcgtctcttgcaaaaagacacgcgtcttcttcatcgacagagaatgtaggcaaggccacggcggttgcgcctcatttggccaagaaacgagcccctcttggtgacattacgaatcaaaagaatgtgactcaaaaagggtcaagaaccttaattccatcatctactttggcaccattctcaaataaatttgccaaggtgaagaagggacctcctgcttctaatagcagtactttacctgcattcttaaatgcgaaatcgagtgctgttggtgtttgtaaggtgatctctatctcaacaagagacgaaagtgtccctcctgttgctgctgtttctgttccatgcagcaatgatgtttctccaagtaaatctgatgatctttcaatttctttggatgaatcaatgtccacctgtgattcttttaagagccccgaggttgaatatatagataacaatgaaataatagcaattgattctatcaataagaagaccttgagcaatctgtacatctcagatcatttggaaactgcagaaaatgtatgcatcagagatactcgtactgatatggaaacagatgataaaattgttaatgttgatgacaattaccaggatccgcagctttgtgcaaccattgcctgtgatatttacaagcatttgcgtgcatctgagatgaagaaaagaccctccacagacttcatggaaagaattcagaaagacataaatgccagcatgcgtgcaatactggttgactggcttgtggaggtagctgaagagtacaggcttgtaccagataccctgtatttgaccgtgaactacattgatcgatatctgtctggcaatgtgatgaacaggcaacgactgcagctgcttggtattgcctgcatgatggttgctgcgaaatacgaggaaatatgtgcaccccaggtggaagagttttgctacattaccgataacacatatttcagagatgaggttctggaaatggaatcaactgttttgaactacttgaagtttgaaatgacagccccaacagctaaatgttttttgaggcgatttgttcgtgctgctcaaggaatcaatgaggttccatcaatgcagttggaatgcttggccaactacattgcagaattatctctcctggaatatactatgctttgctatgctccgtcgctggtagctgcctctgccattttcctggccaaatatatacttcttccttcaaagagaccgtggaattccacattgcaacattacacactttacgagcctgttgatttgtgtcactgtgtaaaggatctctatcgcctgtgttgtggaagccataattctactttacccgcaatcagggagaaatacagtcagcataagtacaaatttgtagctaagaagtactgtccaccttccatacccgaggaattcttccagaacctaagctgctag

SEQ ID NO: 792 - protein, 493 aa, Populus balsamifera subsp. trichocarpa
  misc_feature: Ceres ANNOT ID no.1452143
  misc_feature: Bit score of 431.0 for HMM based on sequences of FIGURE 9.
  misc_feature (228)..(355): Pfam Name: Cyclin_N Pfam Description: Cyclin, N-terminal domain
  misc_feature (357)..(484): Pfam Name: Cyclin_C Pfam Description: Cyclin, C-terminal domain
  misc_feature: Functional Homolog Of Ceres SEEDLINE ID no. ME08564 at SEQ ID NO. 764
MSTQTRRSSFSSSTSSSLAKRHASSSSTENVGKATAVAPHLAKKRAPLGDITNQKNVTQKGSRTLIPSSTLAPFSNKFAKVKKGPPASNSSTLPAFLNAKSSAVGVCKVISISTRDESVPPVAAVSVPCSNDVSPSKSDDLSISLDESMSTCDSFKSPEVEYIDNNEIIAIDSINKKTLSNLYISDHLETAENVCIRDTRTDMETDDKIVNVDDNYQDPQLCATIACDIYKHLRASEMKKRPSTDFMERIQKDINASMRAILVDWLVEVAEEYRLVPDTLYLTVNYIDRYLSGNVMNRQRLQLLGIACMMVAAKYEEICAPQVEEFCYITDNTYFRDEVLEMESTVLNYLKFEMTAPTAKCFLRRFVRAAQGINEVPSMQLECLANYIAELSLLEYTMLCYAPSLVAASAIFLAKYILLPSKRPWNSTLQHYTLYEPVDLCHCVKDLYRLCCGSHNSTLPAIREKYSQHKYKFVAKKYCPPSIPEEFFQNLSC

SEQ ID NO: 793 - protein, 425 aa, Brassica napus
  misc_feature: Public GI ID no.562190
  misc_feature: Bit score of 382.7 for HMM based on sequences of FIGURE 9.
  misc_feature (160)..(287): Pfam Name: Cyclin_N Pfam Description: Cyclin, N-terminal domain
  misc_feature (289)..(416): Pfam Name: Cyclin_C Pfam Description: Cyclin, C-terminal domain
  misc_feature: Functional Homolog Of Ceres SEEDLINE ID no. ME08564 at SEQ ID NO. 764
MSKTTNQNRRPSFTSSTESSMRKRHGPSSSSSAVKPISNTAVMVAKKRAPLGNITNQRKDSRIFPNSSSADSAHCPNKSAKLKLAAPTQPVCVNACETKSTCEEEVVPIERKAFSNLCITPSSDTTTNVMSETENKEEKFMNIDNKDDADPQLYATFACDIYNHLRAAEAKKQPAVDYMETVQKDVNSTMRGILVDWLVEVSEEYRLVPETLYLTVNYIDRYLSGNVISRQKLQLLGVACMMIAAKYEEVCAPQVEEFCYITDNTYLKDEVLDMESAVLNYLKFEMSAPTVKCFLRRLFSGCPRVHEAPCMQLECMASYIAELSLLEYTMLSHPPSLVAASAIFLAKYTLDPTRRPWNSTLRHYTQYEAMELRGCVMDLQRLCSNAHVSTLPAVRDKYSQHKYKFVAKKFCPSIIPPDFFKNSLY

SEQ ID NO: 794 - DNA, 1773 bp, Glycine max
  misc_feature: Ceres CLONE ID no.602910
  misc_feature: Encodes the peptide sequence at SEQ ID NO. 795
aaaattcagagcgtgcaaattgcaaaatgcagaaattgctcaacgatttcccccaaaaaatgagtttcacgggaagcgggaagaagacccaccgcaaaaatttcaaaccacaaagacagcattaatattcttcctttcatttccagttcttcttcttaaaccccttattctccttctctcttgcactgtcttacaatttgaattttccaatggcaacttctgagaacaacagcagcgcgcgtccccaacgcgaagcgaagaagagggccgcagctgcaatatcccaaattcatggcaacgccgccaagaagaaacgcgtcgttttaggcgacgtcactaacgtttcctcaagcgacgtcgccgtttccgtttccaaaaaacccgttcagacacataaaaatgttaaactcgagaaaccggccgcgccggttgccacgccggagaaggttgaggaaagacacgacccgcaactctgtgggccctacgtttctgatatatacgaataccttcgcggaatggaggtggatcctagtaagagaccattgatggattatgttcagaagattcagagggatgttaatgctaacatgcgcggtgttcttgtggattggttggtggaagttgcagaagaatacaaacttgtttcggacacgctttatttctctgttgcttatattgataggtttttgtcgttgaatattttgtcgagacagaggttgcaattgctgggggttgcttcaatgctcattgcttcgaaatacgaagagattaagccgcccgaggtggaggatttttgttacattacggataacacatactctaaggaagaggttgtgaacatggaggctgaaatattgaaggctttgaaatttgaattgggtggtcctacagtgaagacattcttgaggagattctccagagttggtcaagagggtgttgatacttctgatctccagtttgagttccttagctgctaccttgccgagctcagtttgttggattataattgtataaagtttttgccatctttggtggctgcatcagttgtattcctagcaagatttatgtttagcacaaagacacatccttggaattcggcactccatcaactcactagatataaacctgctgacttgaaggaatgtgttctaaacttacatgacttgtacctcagtaggagaggggcctctttgcaagctgtgagagagaaatacaaacagcataagttcaaatgtgtggcaacaacaccatctcctcccgagatacctctttctttttttgaatttgaggggcagattcttaggcaattgtaatttggctattcttggtatggctctggtttcaactattggcaggaaagtgtttcctaacactagagatgagagtttcagacattttgttgcacttgtttgtagagagagagaggtgcttgccagaaatgcagcgacaacatactatgctggcctcactgactttgtgattgagcttgtgtgaaaatgagataaatcccattagttgagaattaggttattttttgacaattagaagttctttgtaagatttccttgaaggatttatgatttctatgtatagggaaatgctatacgttttcattgtagttgttccattctaagatgtccaaactctgatattcagaaatcaatttttcagctgtaaacaagtgttggattggttactttaacccaaccatttttgtccgtggtctaaacaaatgtctgtgatagaatataattgagtttgtctgtgtagtct

SEQ ID NO: 795 - protein, 367 aa, Glycine max
  misc_feature: Ceres CLONE ID no.602910
  misc_feature: Bit score of 334.9 for HMM based on sequences of FIGURE 9.
  misc_feature (226)..(353): Pfam Name: Cyclin_C Pfam Description: Cyclin, C-terminal domain
  misc_feature (95)..(224): Pfam Name: Cyclin_N Pfam Description: Cyclin, N-terminal domain
  misc_feature: Functional Homolog Of Ceres SEEDLINE ID no. ME08564 at SEQ ID NO. 764
MATSENNSSARPQREAKKRAAAAISQIHGNAAKKKRVVLGDVTNVSSSDVAVSVSKKPVQTHKNVKLEKPAAPVATPEKVEERHDPQLCGPYVSDIYEYLRGMEVDPSKRPLMDYVQKIQRDVNANMRGVLVDWLVEVAEEYKLVSDTLYFSVAYIDRFLSLNILSRQRLQLLGVASMLIASKYEEIKPPEVEDFCYITDNTYSKEEVVNMEAEILKALKFELGGPTVKTFLRRFSRVGQEGVDTSDLQFEFLSCYLAELSLLDYNCIKFLPSLVAASVVFLARFMFSTKTHPWNSALHQLTRYKPADLKECVLNLHDLYLSRRGASLQAVREKYKQHKFKCVATTPSPPEIPLSFFEFEGQILRQL

SEQ ID NO: 796 - protein, 373 aa, Oryza sativa subsp. japonica
  misc_feature: Public GI ID no.115454079
  misc_feature: Bit score of 340.7 for HMM based on sequences of FIGURE 9.
  misc_feature (106)..(235): Pfam Name: Cyclin_N Pfam Description: Cyclin, N-terminal domain
  misc_feature (237)..(364): Pfam Name: Cyclin_C Pfam Description: Cyclin, C-terminal domain
  misc_feature: Functional Homolog Of Ceres SEEDLINE ID no. ME08564 at SEQ ID NO. 764
MAGKENAAAAQPRLTRAAAKRAAAVTAVAVAAKRKRVALSELPTLSNNNAVVLKPQPAPRGGKRAASHAAEPKKPAPPPAPAVVVVVDDDEEGEGDPQLCAPYASDINSYLRSMEVQAKRRPAADYIETVQVDVTANMRGILVDWLVEVAEEYKLVSDTLYLTVSYIDRFLSAKSINRQKLQLLGVSAMLIASKYEEISPPNVEDFCYITDNTYMKQEVVKMERDILNVLKFEMGNPTTKTFLRMFIRSSQEDDKYPSLPLEFMCSYLAELSLLEYGCVRLLPSVVAASVVFVARLTLDSDTNPWSKKLQEVTGYRASELKDCITCIHDLQLNRKGSSLMAIRDKYKQHRFKGVSTLLPPVEIPASYFEDLNE

SEQ ID NO: 797 - protein, 521 aa, Oryza sativa subsp. japonica
  misc_feature: Public GI ID no.56783937
  misc_feature: Bit score of 416.5 for HMM based on sequences of FIGURE 9.
  misc_feature (239)..(366): Pfam Name: Cyclin_N Pfam Description: Cyclin, N-terminal domain
  misc_feature (391)..(512): Pfam Name: Cyclin_C Pfam Description: Cyclin, C-terminal domain
  misc_feature: Functional Homolog Of Ceres SEEDLINE ID no. ME08564 at SEQ ID NO. 764
MAAKRPAAGEGGGKAAAGAAAAKKRVALVNITNVAAAANNAVNRLNSLEGLLAPSKVQNKSFLGIREKFNSATWAAPVKKGSLASGRNVCTNRVSAVKSASAKPAPAISRHESAPQKESVIPPKVLSIVPTAAPAPVTVPCSSFVSPMHSGDSVSVDETMSMCDSMKSPDFEYIDNGDSSSVLGSLQRRANENLRISEDRDVEETKWNKDAPSPMEIDQICDVDNNYEDPQLCATLASDIYMHLREAETRKRPSTDFMETIQKDVNPSMRAILIDWLVEVAEEYRLVPDTLYLTVNYIDRYLSGNEINRQRLQLLGVACMLIAAKYEEICAPQVEEFCYITDNTYFRDEVLEMEASVLNYLKFEVTAPTAKCFLRCWNESNSNNSLIAYNRRFVRVAQVSDEDPALHLEFLANYVAELSLLEYNLLSYPPSLVAASAIFLAKFILQPTKHPWQNSTLAHYTQYKSSELSDCVKALHRLFSVGPGSNLPAIREKYTQHKYKFVAKKHCPPSVPSEFFRDATC

SEQ ID NO: 798 - protein, 373 aa, Oryza sativa subsp. indica
  misc_feature: Public GI ID no.125544822
  misc_feature: Bit score of 338.7 for HMM based on sequences of FIGURE 9.
  misc_feature (106)..(235): Pfam Name: Cyclin_N Pfam Description: Cyclin, N-terminal domain
  misc_feature (237)..(364): Pfam Name: Cyclin_C Pfam Description: Cyclin, C-terminal domain
  misc_feature: Functional Homolog Of Ceres SEEDLINE ID no. ME08564 at SEQ ID NO. 764
MAGKENAAAAQPRLTRAAAKRAAAVTAVAVAAKRKRVALSELPTLSNNNAVVLKPQPAPRGGKRTASHAAEPKKPAPAPAPAVVVVVDDDEEGEGDPQLCAPYASDINSYLRSMEVQPKRRPAADYIETVQVDVTANMRAILVDWLVEVAEEYKLVSDTLYLTVSYIDRFLSAKAINRQKLQLLGVSAMLIASKYEEISPPNVEDFCYITDNTYMKQEVVKMERDILNVLKFEMGNPTTKTFLRMFIRSSQEDDKYPSLPLEFMCSYLAELSLLEYGCVRLLPSVVAASVVFVARLTLDPDTNPWSKKLQEVTGYRASELKDCITCIHDLQLNRKGSSLMAIRDKYKQHRFKGVSTLLPPVEIPASYFEDLNE

SEQ ID NO: 799 - DNA, 1323 bp, Sorghum bicolor
  misc_feature: Ceres ANNOT ID no.6034905
  misc_feature: Encodes the peptide sequence at SEQ ID NO. 724
atgggcatctcggcgaggtggctcaagtcgttagttgggttgaggaaggtggagcggcagcagcagcatcgtaaggaggatgcagatgttggacgaatgaaaggcgatgttgccgatcagtttcattttcagaatcagcgctctcaagaagacagcagcattgctgcacaagaagaaattccagaggttccttatggaaatgatccacctgaagttgattctaatgcaccttcatgcttggaacccacttgtgattcagctcatgtgccactgtctcaaaccgaagaggaactggaagagatctgggctgctacgattattcagacagcatttagagcattcctggctaggagagcccgtcgagctttaaaagggctggttaggcttcaagcccttgtaaggggtcatatagtaagaaagcaagctgccacgacactccgctgtatgcaagctttggtcagagttcaggcccgtgttagagcaaggcgagttcgcatggctttggaaaaccagactgaccagcaaaatacttcaccagagcacacgattgaggcacgtgttagagaaattgaggatggctggtgtgatagtatcggttctgtggaagatatccaagcaaaacttctaaagaggcaggaagcagcagctaaacgggagcgagccatggcctatgctctagctcatcagtggcaagcaagttcaagacaagctgcatcatttgaacctgacaagaacagctggggctggaattggctagagagatggatggctgttcggccttgggagagtcggttccttggcacttacgctgcagatgggatttttgtagttaatgaaaccaggcaacctgacataagtgcaacgaagaccccatgcagaaaacctgttaaaaagcatgattcaacccttcaatcaaacacattgaaccagaaggtcttcccatcaaactcagagggtggtggctcctcgacaaaccgatccagtggttcggcatcagctaaatctagactgaaggttttacccagagaaggcgctgaggaagcttcatctcgtccttctgtacttgttgtgcggtccactagtaacccaagggagaggacttccaatattaattcaaaagagaggactggggacttggattgtcaagttcataaaagattctccttgcctggcattggttcagaagctggcaaacacctgacaaagaaaggcacggttaaccgatccctgaaggccacaaaagattcccaaatactggggtcaaggcaccatcttgccagttccattgatccagttcccactagagttgagctagagacttga

SEQ ID NO: 800 - DNA, 1461 bp, Arabidopsis thaliana
  misc_feature: Ceres CLONE ID no.37206
  misc_feature: Encodes the peptide sequence at SEQ ID NO. 801
aaaaatttcgaaatcggaaaatttacacagagaagcgccatgacctaaaaatctcaaaacttccccaacaaaaatggcgcttttactcaacccatttccttttacctaccttgtacattaccccttttctcaaatctcactttcccactgaaataaccccatggcggagaatcagaactgtgcgaggatgacgagagcggcggcgaaacgaaaagcgtcgtccatggcgttagacgaaaacccagttagtaagaagagagttgttctcggagagcttccgaatatgtccaatgtcgttgctgtacccaatcaagaaagagagacccttaaggctaaaacaagtgttaatacctcgaagaggcagatgaagaaggctttgatgattcctgaagctagcgtactaatcgaatcgagatctgttgatcctcagatgtgtgagccttttgctagtgatatttgtgcttatctccgtgaaatggaggggaagccgaaacatagaccactacctgattatattgaaaaggttcagagtgatttaactccacacatgagagcggttttggtggattggttagtggaggttgctgaggagtacaagcttgtttcggatacgctttatctcactatctcctatgttgatagattcttgtctgtgaagcctattaacaggcagaagcttcagcttgtgggagtttctgcaatgcttattgcgtcgaaatatgaagagataggtcctcctaaagttgaagatttttgttacattacggataatacatttactaaacaagaagtggtgtcgatggaggcggatatacttcttgctctgcagtttgaattaggaagcccaaccatcaaaacattcctaagacggtttacacgggttgcacaagaagatttcaaagactcacaattgcagatagagttcctttgttgctatctatcagaattgagtatgttagattacacctgtgtgaagtatttgccatctcttttgtctgcttcagctgtatttcttgcccggttcatcatccgtccaaaacaacatccttggaatcaaatgctagaagaatacacaaagtacaaagcagctgatctacaagtgtgcgtgggtatcatacatgacttgtatctaagcagaagaggaaacactctagaagctgttagaaataagtacaagcaacacaagtacaagtgcgttgcgaccatgcctgtttcaccggagctacctcttgctttctttgaagatattaccattagaggaatggcgtaaaagaagcttgaagcttatgtattggaagtgttagttacctgaattttgggttgtatatatctgttagaatggcagattagtattgagtattatctcttttagcgtatgttcaatgattttttgctaacactagttaagaaactttttttttttgcttgaccattttttcaatggtttattagatttttatt

SEQ ID NO: 801 - protein, 369 aa, Arabidopsis thaliana
  misc_feature: Ceres CLONE ID no.37206
  misc_feature: Bit score of 297.1 for HMM based on sequences of FIGURE 9.
  misc_feature (229)..(356): Pfam Name: Cyclin_C Pfam Description: Cyclin, C-terminal domain
  misc_feature (98)..(227): Pfam Name: Cyclin_N Pfam Description: Cyclin, N-terminal domain
  misc_feature: Functional Homolog Of Ceres SEEDLINE ID no. ME08564 at SEQ ID NO. 764
MAENQNCARMTRAAAKRKASSMALDENPVSKKRVVLGELPNMSNVVAVPNQERETLKAKTSVNTSKRQMKKALMIPEASVLIESRSVDPQMCEPFASDICAYLREMEGKPKHRPLPDYIEKVQSDLTPHMRAVLVDWLVEVAEEYKLVSDTLYLTISYVDRFLSVKPINRQKLQLVGVSAMLIASKYEEIGPPKVEDFCYITDNTFTKQEVVSMEADILLALQFELGSPTIKTFLRRFTRVAQEDFKDSQLQIEFLCCYLSELSMLDYTCVKYLPSLLSASAVFLARFIIRPKQHPWNQMLEEYTKYKAADLQVCVGIIHDLYLSRRGNTLEAVRNKYKQHKYKCVATMPVSPELPLAFFEDITIRGMA

SEQ ID NO: 802 - protein, 355 aa, Pisum sativum
  misc_feature: Public GI ID no.7242793
  misc_feature: Bit score of 325.7 for HMM based on sequences of FIGURE 9.
  misc_feature (216)..(344): Pfam Name: Cyclin_C Pfam Description: Cyclin, C-terminal domain
  misc_feature (85)..(214): Pfam Name: Cyclin_N Pfam Description: Cyclin, N-terminal domain
  misc_feature: Functional Homolog Of Ceres SEEDLINE ID no. ME08564 at SEQ ID NO. 764
MADQDNSTRRPQREAKKRAVAALCEQRKRKRVALGDITNDVVSETEKLVSDSHSHTQKKKKRNIAKSPVPEKLEDPQLCEPYVSDIHDYLRNLEVDPSKRPLPDYIQKVQRDINANMRGVLVDWLVEVAEEYKLVADTLYFSVSYIDRFLSLNDLSRQKLQLLGVSSMLIASKYEEIKPPEVEDFCYITDNTYSKEEVLSMEAEILKTLKFELGGPTIKTFLRRFITKVGQEGVDASELQFEFLCCYLAELSLLDYNCVKFLPSMVAASVVFLARFMLNPKSRPWNSAICQFTSYKPADLKECVLNMHDLYLGRKGATLQAVRDKYKQHKFKCVATTPSPPEISLSFFEFRGADP

SEQ ID NO: 803 - DNA, 1774 bp, Panicum virgatum
  misc_feature: Ceres CLONE ID no.1861068
  misc_feature: Encodes the peptide sequence at SEQ ID NO. 804
cgaccccaggtcagacgggatcacccgctgagtttaagcatataaataagcggaggagaagaaacttacaaggattcccctagtaacggcgagcgaaccgggagcagcccagcttgactccggacccagcgccgccaaaccctaggagcccgtgccgccgccgacgaggaggatggcggacaaggagaacgcgccggcggcggcggccgcggggccccggctcacccgatccgccgccaagcgcgcggccgaggccgccgccggcgcccccgccaagcgcaagcgggtggcgctcggggagctcccggcgctcgccgccaacgccgccaccgtccaccgcaccccgctggcccgcccggtcaagcccgcgaggggcgccgccaaggccgccaggcccggcaagccggtccccagacccgcagccgcccccgcggctgcggccgacgccgaagccgagcgctgcggatcctcctcgccgcggcgcgccgcgggggccgccgaccccgacctcgactcctccgcgtccaactcccctccgcgcgcggccgccgccgcggaccccgaccgcgactcctccgcctcctcctcccccccgccgcgcgctgccggggcgggggctctcggcaacccgcagctctgcgggtcctacgcctccgacatctacacctaccaccgcgctctggaggtggagccgcggcggcggccgagatccgactacattgaggccgtgcagtcggacgtcacggccaacatgcggaccatcctcgtcgactggctcgtcgaggtcgccgaggagtacaagctcgtcgccgacacgctctacctcgccatctcctacgtcgaccgcttcctctccgccaacgcgctcagccgtgacaagctgcaactccttggcgtcgctgccatgctcatcgccgcgaagtacgaagagatcagcccccctcatgcggaggacttctgctacatcactgacaatacctacactaagcaggagcttcttaagacagagagtgacatactcaagctgctccagtttgagttgggcaatcctacaattaagaccttcctgaggcggttcacaagatcggcccatgaagacaaaaagcgctccatcttattaatggagttcttggggagctaccttgctgagctgagtctgctggactatggctgtctccggttcttgccatcagtagttgctgcttcagtgatgtttgttgctaggctgaccattgatccagatgtcaatccttggaacaagaagttgcagaaggtgacaggctacaaggtttctgaactcaaggattgcattgtagccatacatgacttgcagctcaacaagaagtgttcatcagtgatggcaattcgggacaagtacaagcaacacaagttcaaatttgtatcgaccctgcttcctcctgttgtgatccctactccatactttgaagacttagcggagtagctggtcatggacccacaccactgtaaggctaacaatctgagctcttcttgagctcttagggataggggagaactactactattgatgtgctgcttctcagtgaagtagatactgattgctgaaagccatttatgtgctcgtggttctttaggagttgctagtagtgagacaaggcattcttctgttttgtgaattgtattttttgtatcatatcttaggacatgttgccttggtctgttggccacaaacttgtaatgtttgatatgttggctcattccttctgaatctcattgatttcaataacaaattctg

SEQ ID NO: 804 - protein, 429 aa, Panicum virgatum
  misc_feature: Ceres CLONE ID no.1861068
  misc_feature: Bit score of 371.4 for HMM based on sequences of FIGURE 9.
  misc_feature (162)..(291): Pfam Name: Cyclin_N Pfam Description: Cyclin, N-terminal domain
  misc_feature (293)..(420): Pfam Name: Cyclin_C Pfam Description: Cyclin, C-terminal domain
  misc_feature: Functional Homolog Of Ceres SEEDLINE ID no. ME08564 at SEQ ID NO. 764
MADKENAPAAAAAGPRLTRSAAKRAAEAAAGAPAKRKRVALGELPALAANAATVHRTPLARPVKPARGAAKAARPGKPVPRPAAAPAAAADAEAERCGSSSPRRAAGAADPDLDSSASNSPPRAAAAADPDRDSSASSSPPPRAAGAGALGNPQLCGSYASDIYTYHRALEVEPRRRPRSDYIEAVQSDVTANMRTILVDWLVEVAEEYKLVADTLYLAISYVDRFLSANALSRDKLQLLGVAAMLIAAKYEEISPPHAEDFCYITDNTYTKQELLKTESDILKLLQFELGNPTIKTFLRRFTRSAHEDKKRSILLMEFLGSYLAELSLLDYGCLRFLPSVVAASVMFVARLTIDPDVNPWNKKLQKVTGYKVSELKDCIVAIHDLQLNKKCSSVMAIRDKYKQHKFKFVSTLLPPVVIPTPYFEDLAE

SEQ ID NO: 805 - protein, 370 aa, Arabidopsis thaliana
  misc_feature: Public GI ID no.42571785
  misc_feature: Bit score of 288.3 for HMM based on sequences of FIGURE 9.
  misc_feature (230)..(357): Pfam Name: Cyclin_C Pfam Description: Cyclin, C-terminal domain
  misc_feature (98)..(228): Pfam Name: Cyclin_N Pfam Description: Cyclin, N-terminal domain
  misc_feature: Functional Homolog Of Ceres SEEDLINE ID no. ME08564 at SEQ ID NO. 764
MAENQNCARMTRAAAKRKASSMALDENPVSKKRVVLGELPNMSNVVAVPNQERETLKAKTSVNTSKRQMKKALMIPEASVLIESRSVDPQMCEPFASDICAYLREMEGKPKHRPLPDYIEKVQSDLTPHMRAVLVDWLVEVAEEYKLVSDTLYLTISYVDRFLSVKPINRQKLQLVGVSAMLIASRKYEEIGPPKVEDFCYITDNTFTKQEVVSMEADILLALQFELGSPTIKTFLRRFTRVAQEDFKDSQLQIEFLCCYLSELSMLDYTCVKYLPSLLSASAVFLARFIIRPKQHPWNQMLEEYTKYKAADLQVCVGIIHDLYLSRRGNTLEAVRNKYKQHKYKCVATMPVSPELPLAFFEDITIRGMA

SEQ ID NO: 806 - protein, 443 aa, Sorghum bicolor
  misc_feature: Ceres ANNOT ID no.6100259
  misc_feature: Bit score of 28.0 for HMM based on sequences of FIGURE 16.
  misc_feature (107)..(127): Pfam Name: IQ Pfam Description: IQ calmodulin-binding motif
  misc_feature: Functional Homolog Of Ceres SEEDLINE ID no. ME24091 at SEQ ID NO. 922
MGGSGKWVKSLIGLKKPDKEDCCKEKLQFPSVHGGLRGKGRKWKLWRTSSGDQGSIWRGSRGGSQRSAASEASDDASSVAAPADPFTAAVATVTRAPARDFMAVRQEWAAIRIQTAFRGFLARRALRALKGLVRLQAIVRGRQVRKQAAVTLRCMQALVRVQARIRARRVRMSTEGQAVQKLLEARRTQMDILREAEEGWCDSQGTLEQVRVKLQKRQEGAIKRERAIAYAYSQQADGAAKCNPPKLTSNGRVNPSGMLLKHQNFDKSNVNWSWLERWMAARPWENRLMEEHNQTNSSSPDFRSSKNCEDSFGVLGDFSEPNSVKVRKNNVSKRVCAKPPGPTHAHGHHQRLKAQSISSLSTELHNDESSASSSSCFASTPISFSTFVTSEKTEDNVRTRPNYMSMTESIKAKQKACNAQRTVALKQSDDRKVMSAELMAAQV

SEQ ID NO: 807 - DNA, 1444 bp, Arabidopsis thaliana
  misc_feature: Ceres CLONE ID no.121607
  misc_feature: Encodes the peptide sequence at SEQ ID NO. 808
cactcatccgatctctcaatcctctcaaatctcaaactctcttcccatcactctctcgctctctcttcaatctcatctcaatcatgacagagcaagagatctgcgtgagggttacaagagcggcggcgaaacgaaaagcttcgacggcgatgggtattgacggagatcgggtcaacaagaagagagttgttctcggtgagcttctaaacgtctccaatgtcaatctcttggctaatctcaatcagaagaaagaaacccagaagccgaaaaggaatcttaaacctcctccggcgaaacagattaagtcagctccggtggctattattgacctagaatcaaaatctgacattgattctcgatctgatgatcctcaaatgtgtggaccttatgttgctgatatctacgagtatcttcgtcaacttgaggtgaagccaaagcagagacctttaccagattacatagagaaagttcagaaagatgtaacaccaagtatgagaggtgttttggttgattggttagtggaagttgctgaagagtataaacttggatctgaaacactttatctcactgtctcacatattgatagattcttgtctttaaagactgttaacaagcaaaagctacagcttgttggagtttctgctatgcttattgcttcgaaatatgaagagataagtcctcctaaagtggatgatttttgttacattacggataatacgttttcgaaacaagatgttgtgaagatggaagctgatatacttcttgctcttcagtttgagttgggaagaccaacgattaatacttttatgagacggtttactagagttgcacaagacgatttcaaagttccacatttgcagctagagcctctttgttgctatttgtcagaattgagtatattagattataagactgtgaagtttgtgccgtctctgttggctgcttctgctgtttttctcgctcggttcatcatccgtccgaaacaacatccttggaaccaaatgttagaagagtacacaaagtacaaagcggctgatctacaagtgtgtgttggaatcatacatgacttgtatttgagcagaagaggaggtgctttacaagctgttagagagaaatataagcaccataagttccaatgcgttgcgaccatgcctgtttcaccagagctgccggttaccttttgggaggatgttaccatttgatctgaggttatgctatcttaagcaaatgttacggagctcgattaccgaatcttgtttcaaatagtataatggacacagatcttcaagtgaagctagaagagtaacaactatagaagtgaaggcaggagcaaataagtttgtgttatgtgaagatgtgtgatgtattattgaaatctcttttttttttttctacaaaattttagtgtgaaattcggaataatataattttatacaattatgcc

SEQ ID NO: 808 - protein, 372 aa, Arabidopsis thaliana
  misc_feature: Ceres CLONE ID no.121607
  misc_feature: Bit score of 340.0 for HMM based on sequences of FIGURE 9.
  misc_feature (105)..(234): Pfam Name: Cyclin_N Pfam Description: Cyclin, N-terminal domain
  misc_feature (236)..(363): Pfam Name: Cyclin_C Pfam Description: Cyclin, C-terminal domain
  misc_feature: Functional Homolog Of Ceres SEEDLINE ID no. ME08564 at SEQ ID NO. 764
MTEQEICVRVTRAAAKRKASTAMGIDGDRVNKKRVVLGELLNVSNVNLLANLNQKKETQKPKRNLKPPPAKQIKSAPVAIIDLESKSDIDSRSDDPQMCGPYVADIYEYLRQLEVKPKQRPLPDYIEKVQKDVTPSMRGVLVDWLVEVAEEYKLGSETLYLTVSHIDRFLSLKTVNKQKLQLVGVSAMLIASKYEEISPPKVDDFCYITDNTFSKQDVVKMEADILLALQFELGRPTINTFMRRFTRVAQDDFKVPHLQLEPLCCYLSELSILDYKTVKFVPSLLAASAVFLARFIIRPKQHPWNQMLEEYTKYKAADLQVCVGIIHDLYLSRRGGALQAVREKYKHHKFQCVATMPVSPELPVTFWEDVTI

SEQ ID NO: 809 - protein, 371 aa, Nicotiana tabacum
  misc_feature: Public GI ID no.2196455
  misc_feature: Bit score of 302.2 for HMM based on sequences of FIGURE 9.
  misc_feature (107)..(236): Pfam Name: Cyclin_N Pfam Description: Cyclin, N-terminal domain
  misc_feature (238)..(365): Pfam Name: Cyclin_C Pfam Description: Cyclin, C-terminal domain
  misc_feature: Functional Homolog Of Ceres SEEDLINE ID no. ME08564 at SEQ ID NO. 764
MANEENKAAPTNTSRASNKRAFDDTLAAASSNGNDPLLKRVVLGELTNLEYVVGSTKTNTHNSKHKIKLKKTAPTKRKKIAIQSFKSDAATNFSPNDDLQKCAYAPLIYQHLHSLEVEARRRPLSNYMEKVQNDVTPTMRMILVDWLVEVADEYKLVSDTLYLTVTFVDRFLSSHVMARNSLQLLGVSCMLVASKYEEISPPHVEDFCYITDNTYTGEEVVNMERDLLNFLNFEISNPTTKTFLRIFTKVSQDNVDFLTLHFEFLGCYLAELSLLDYSCVRFLPSAVAASAIFLSRFTLLPKVHPWNLALQHCTGYKPSELKDCVLVIHELQSGRRAASVQAVRKKYMDHKYKCVAALHPPDIPACFFDDA

SEQ ID NO: 810 - protein, 371 aa, Nicotiana tabacum
  misc_feature: Public GI ID no.1064925
  misc_feature: Bit score of 300.5 for HMM based on sequences of FIGURE 9.
  misc_feature (107)..(236): Pfam Name: Cyclin_N Pfam Description: Cyclin, N-terminal domain
  misc_feature (238)..(365): Pfam Name: Cyclin_C Pfam Description: Cyclin, C-terminal domain
  misc_feature: Functional Homolog Of Ceres SEEDLINE ID no. ME08564 at SEQ ID NO. 764
MANEENKASPTNTSRASNNRAFDDTLAAASSNGNDPLLKRVVLGELTNLEYVVGSTKTNTHNSKRKIKLKKTAPTKRKKVAKQSFKSDAATNFSPNDDLQKCAYAPLIYQHLHSLEVEERRRPLSNYMEKIQNDVTPTMRMILVDWLVEVADEYKLVSDTLYLTVTFIDRFLSSHVLARNSLQLLGVSCMLAASKYEEISPPHVEDFCYITDNTYTGEEVVNMERELLNFLDFEISNPTTKTFLRIFTKAAQDNVDFLTLHFEFLGCYLTELSLLDYSCVQFLPSVVAASAIFLSRFTILPKVHPWNLALQQCTGYKPSELKDCVLVIHELQSGRRAASVQAVRKKYMDHKYKCVAALHPPDIPACFFDDA

SEQ ID NO: 811 - DNA, 1381 bp, Zea mays
  misc_feature: Ceres CLONE ID no.339439
  misc_feature: Encodes the peptide sequence at SEQ ID NO. 812
gacctgtcgtcttcgtctccggcagagcaaagcggcggcgaggcgggagatatagaggagagacgagagcgggatggggtacctgtggagggtgcggctgtcttcatttgctgccggcgcggcgacggcttcggcggcggggttcttcctcctctacaaggaccacctgctcgcccgcgctgccgacgccgagtccaactccgcctcctactccccgccgctcgccacagccgacaccgctttctccgcgccgccgcgcgccgtggcgcccgccgacctccagctctccgggtcctacgcctccgacatctacacctacctccgctccctggaggtggatccgcagcggcggtccagatccgattacatcgaggcggtgcaggcggacgtcacggcccacatgcggagcatcctcgtcgactggctcgtcgaggtcgccgaggagtacaagctcgtcgcggacacgctctacctcaccatctcttatgtcgaccgcttcctctccgtcaacgcgctcggccgtgacaagctgcagctccttggcgttgcctccatgctcattgccgcgaagttcgaggagatcagcccgccgcacccggaggacttctgctacatcacagacaacacctacaccaaagaggagctcctcaagatggagagcgacatactcaagcttctcaagttcgagttgggcaatcctacaatcaagaccttcctgagacgtttcataagatctgcccatgaagacaagaagggctccatcttgttaatggaattcttggggagctacctcgctgagctgagtctactagattatggctgcctccggttcttgccatcagtagttgctgcttcagtcatgtttgttgctaggctgaccattgatccaaataccaatccgtggaacacaaagctgcagaagatgactggctacaaagtttctgaactcaaggattgcatcgtagccatacatgacttgcagctcaacaggaaatgtccatcattaacggcaattcgagacaagtacaagcagcacaagttcaaatgcgtgtcattgatcctcgtgcctgtcgtgatccctacttcatactttgaagacttagctgagtagctgctctcggactgtaccgctgtaaggctaacaatctgagctctccttgagctcttagggacaagcagaaaataaccgtttgatgagctttcctctcatttaagtagcgtggtgaaagctatttgtttgaggttctttaggattcgcgccgctgtgtcactcttagtgagaccaggcattctcttgctgtgaatcttgtatcatatcttagtcacaccttgccttggtccgttggcaacgaatgtaatgtttgatacgttagacccttcg

SEQ ID NO: 812 - protein, 345 aa, Zea mays
  misc_feature: Ceres CLONE ID no.339439
  misc_feature: Bit score of 279.1 for HMM based on sequences of FIGURE 9.
  misc_feature (209)..(336): Pfam Name: Cyclin_C Pfam Description: Cyclin, C-terminal domain
  misc_feature (78)..(207): Pfam Name: Cyclin_N Pfam Description: Cyclin, N-terminal domain
  misc_feature: Functional Homolog Of Ceres SEEDLINE ID no. ME08564 at SEQ ID NO. 764
MGYLWRVRLSSFAAGAATASAAGFFLLYKDHLLARAADAESNSASYSPPLATADTAFSAPPRAVAPADLQLSGSYASDIYTYLRSLEVDPQRRSRSDYIEAVQADVTAHMRSILVDWLVEVAEEYKLVADTLYLTISYVDRFLSVNALGRDKLQLLGVASMLIAAKFEEISPPHPEDFCYITDNTYTKEELLKMESDILKLLKFELGNPTIKTFLRRFIRSAHEDKKGSILLMEFLGSYLAELSLLDYGCLRFLPSVVAASVMFVARLTIDPNTNPWNTKLQKMTGYKVSELKDCIVAIHDLQLNRKCPSLTAIRDKYKQHKFKCVSLILVPVVIPTSYFEDLAE

SEQ ID NO: 813 - protein, 365 aa, Brassica rapa
  misc_feature: Public GI ID no.83032266
  misc_feature: Bit score of 306.4 for HMM based on sequences of FIGURE 9.
  misc_feature (228)..(355): Pfam Name: Cyclin_C Pfam Description: Cyclin, C-terminal domain
  misc_feature (96)..(226): Pfam Name: Cyclin_N Pfam Description: Cyclin, N-terminal domain
  misc_feature: Functional Homolog Of Ceres SEEDLINE ID no. ME08564 at SEQ ID NO. 764
MAENQNSTRMTRAAAKRKASVTDENPVSKKRVVLGELPNNSNVPAPLIPLQERETQKPKSTLFAAKKQTKTPPIPQTVDFESGSSDPQMCGPFVADICAYLREMEGKLKQRPLHDYIEKVQSDLTPSMRGVLMDWLVEVAEEYKLVSDTLYLTVSYVDRFLSAKPINRQRLQLVGVSAMLIASRKYEEISPPKVEDFVYITDNTFTRQDVVSMEADILLALQFELGCPTIKTFLRRFTRVAQEDFNESLLQIECLCCYLSELSLLDYSCVKFLPSMLAASAVFLARFIIRPKQRPWNQMLEEYTKYKASDLQQPVGIIHDLYLSRRGNSLEAVRNKYKQHKFKCVATMPVSPELPQAFFEDVTIR

SEQ ID NO: 814 - protein, 338 aa, Daucus carota
  misc_feature: Public GI ID no.116167
  misc_feature: Bit score of 251.7 for HMM based on sequences of FIGURE 9.
  misc_feature (205)..(331): Pfam Name: Cyclin_C Pfam Description: Cyclin, C-terminal domain
  misc_feature (74)..(203): Pfam Name: Cyclin_N Pfam Description: Cyclin, N-terminal domain
  misc_feature: Functional Homolog Of Ceres SEEDLINE ID no. ME08564 at SEQ ID NO. 764
MTTPEPASKRRVVLGEISNNSSAVSGNEDLLCREFEVPKCVAQKKRKRGVKEDVGVDFGEKFDDPQMCSAYVSDVYEYLKQMEMETKRRPMMNYIEQVQKDVTSNMRGVLVDWLVEVSLEYKLLPETLYLAISYVDRYLSVNVLNRQKLQLLGVSSFLIASKYEEIKPKNVADFVDITDNTYSQQEVVKMEADLLKTLKFEMGSPTVKTFLGFIRAVQENPDVPKLKFEFLANYLAELSLLDYGCLEFVPSLIAASVTFLARFTIRPNVNPWSIALQKCSGYKSKDLKECVLLLHDLQMGRRGGSLSAVRDKYKKHKFKCVSTLSPAPEIPESIFNDV

SEQ ID NO: 815 - protein, 385 aa, Oryza sativa subsp. indica
  misc_feature: Public GI ID no.125537180
  misc_feature: Bit score of 306.2 for HMM based on sequences of FIGURE 9.
  misc_feature (118)..(247): Pfam Name: Cyclin_N Pfam Description: Cyclin, N-terminal domain
  misc_feature (249)..(376): Pfam Name: Cyclin_C Pfam Description: Cyclin, C-terminal domain
  misc_feature: Functional Homolog Of Ceres SEEDLINE ID no. ME08564 at SEQ ID NO. 764
MADKENSTPASAARLTRSSAAAGAQAKRSAAAGVADGGAPPAKRKRVALSDLPTLSNAVVVAPRQPHHPVVIKPSSKQPEPAAEAAAPSGGGGGSPVSSASTSTASPSSGWDPQYASDIYTYLRSMEVEARRQSAADYIESVQVDVTANMRAILVDWLVEVADEYKLVADTLYLAVSYLDRYLSAHPLRRNRLQLLGVGAMLIAAKYEEISPPHVEDFCYITDNTYTRQEVVKMESDILKLLEFEMGNPTIKTFLRRFTRSCQEDKKRSSLLLEFMGSYLAELSLLDYSCLRFLPSVVAASVVFVAKLNIDPYTNPWSKKMQKLTGYKVSELKDCILAIHDLQLRKKCSNLTAIRDKYKQHKFKCVSTLLPPVDIPASYLQDLTE

SEQ ID NO: 816 - protein, 385 aa, Oryza sativa subsp. japonica
  misc_feature: Public GI ID no.115489300
  misc_feature: Bit score of 306.9 for HMM based on sequences of FIGURE 9.
  misc_feature (118)..(247): Pfam Name: Cyclin_N Pfam Description: Cyclin, N-terminal domain
  misc_feature (249)..(376): Pfam Name: Cyclin_C Pfam Description: Cyclin, C-terminal domain
  misc_feature: Functional Homolog Of Ceres SEEDLINE ID no. ME08564 at SEQ ID NO. 764
MADKENSTPASAARLTRSSAAAGAQAKRSAAAGVADGGAPPAKRKRVALSDLPTLSNAVVVAPRQPHHPVVIKPSSKQPEPAAEAAAPSGGGGGSPVSSASTSTASPSSGWDPQYASDIYTYLRSMEVEARRQSAADYIEAVQVDVTANMRAILVDWLVEVADEYKLVADTLYLAVSYLDRYLSAHPLRRNRLQLLGVGAMLIAAKYEEISPPHVEDFCYITDNTYTRQEVVKMESDILKLLEFEMGNPTIKTFLRRFTRSCQEDKKRSSLLLEFMGSYLAELSLLDYGCLRFLPSVVAASVVFVAKLNIDPYTNPWSKKMQKLTGYKVSELKDCILAIHDLQLRKKCSNLTAIRDKYKQHKFKCVSTLLPPVDIPASYLQDLTE

SEQ ID NO: 817 - protein, 392 aa, Oryza sativa subsp. japonica
  misc_feature: Public GI ID no.125587082
  misc_feature: Bit score of 301.5 for HMM based on sequences of FIGURE 9.
  misc_feature (106)..(254): Pfam Name: Cyclin_N Pfam Description: Cyclin, N-terminal domain
  misc_feature (256)..(383): Pfam Name: Cyclin_C Pfam Description: Cyclin, C-terminal domain
  misc_feature: Functional Homolog Of Ceres SEEDLINE ID no. ME08564 at SEQ ID NO. 764
MAGKENAAAAQPRLTRAAAKRAAAVTAVAVAAKRKRFALSELPTLSNNKAVVLKPQPAPRGGKRAASHAAEPKKPAPPPAPAVVVVVDDDEEGEGDPQLCAPYASDINSYLRSMEVQAKRRPAADYIETVQVDVTANMRGILVDWLVEVAEEYKLVSDTLYLTVSYIDRFLSAKSINRQKLQLLGVSAMLIASFTHQFKNRYLLRIGLVDPGKYEEISPPNVEDFGYITDNTYMKQEVVKMERDILNVLKFEMGNPTTKTFLRMFIRSSQEDDKYPSLPLEFMCSYLAELSLLEYGCVRLLPSVVAASVVFVARLTLDSDTNPWSKKLQEVTGYRASELKDCITCIHDLQLNRKGSSLMAIRDKYKQHRFKGVSTLLPPVEIPASYFEDLNE

SEQ ID NO: 818 - protein, 378 aa, Solanum lycopersicum
  misc_feature: Public GI ID no.5420278
  misc_feature: Bit score of 287.7 for HMM based on sequences of FIGURE 9.
  misc_feature (114)..(243): Pfam Name: Cyclin_N Pfam Description: Cyclin, N-terminal domain
  misc_feature (245)..(372): Pfam Name: Cyclin_C Pfam Description: Cyclin, C-terminal domain
  misc_feature: Functional Homolog Of Ceres SEEDLINE ID no. ME08564 at SEQ ID NO. 764
MVDEENKVPATAAASRGSNKRAFDSIAITNENDPLQISERPYPANKKRVVLGELNNLGNVIVSTQNSDLTETHESKRKIKLRKTRNVVKETVELKTSANSSPKDNLQKCSYGPLIYQHLHSLEVEERRRPLSNYMEKVQNNVIPSMRTVLVDWLVEVTEEYKLVSDTLYLAVSYIDRFLSSHVLAMEKLQLLGVSCMLVASKYEEISPPHVEDFCYITDNTYTREEVVNMERDLLSFLNFEISSPTTITFLRIFLKAAQDNLSFLTLQFEFLSCYLAELSLLDYSCVRFLPSMTAASAIFLSRFTVLPEVCPWTLALQQCTGYKPSELKDCVLVIHELQSSLMEATGRALREKYMNHKYKCVAALHPPDIPSCFFDDA

SEQ ID NO: 819 - protein, 454 aa, Oryza sativa subsp. japonica
  misc_feature: Public GI ID no.125569644
  misc_feature: Bit score of 335.9 for HMM based on sequences of FIGURE 9.
  misc_feature (200)..(310): Pfam Name: Cyclin_N Pfam Description: Cyclin, N-terminal domain
  misc_feature (326)..(450): Pfam Name: Cyclin_C Pfam Description: Cyclin, C-terminal domain
  misc_feature: Functional Homolog Of Ceres SEEDLINE ID no. ME08564 at SEQ ID NO. 764
MSSNLAASRRSSSSSSVAAAAAAKRPAVGEGGGGGGGKAAAGAAAAKKRVALSNISNVAAGGGAPGKAGNAVRDGSLVGGLGSFFFLFSKALFFARFGFEIFRSFVSPMHSGDSVSVDETMSTCDSMKSPEFEYIDNGDSSSVLGSLQRRANENLRISEDRDVEETKWKKDAPSPMEIDQICDVDNNYEDPQLCATLASDIYMHLREAETRKRPSTDFMETIQKDVNPSMRAILIDWLVEVAEEYRLVPDTLYLTVNYIDRYLSGNEINRQRLQLLGVACMLIAAKYEEICAPQVEEFCYITDNTYFRDECWNESNSNNSLIAYNRRFVRVAQVSDELFIVQDPALHLEFLANYVAELSLLEYNLLSYPPSLVAASAIFLAKFILQPTKHPWNSTLAHYTQYKSSELSDCVKALHRLFSVGPGSNLPAIREKYTQHKIYAADVIDLNMMIQRDS

SEQ ID NO: 820 - protein, 327 aa, Arabidopsis thaliana
  misc_feature: Public GI ID no.15220145
  misc_feature: Bit score of 205.3 for HMM based on sequences of FIGURE 9.
  misc_feature (190)..(317): Pfam Name: Cyclin_C Pfam Description: Cyclin, C-terminal domain
  misc_feature (59)..(188): Pfam Name: Cyclin_N Pfam Description: Cyclin, N-terminal domain
  misc_feature: Functional Homolog Of Ceres SEEDLINE ID no. ME08564 at SEQ ID NO. 764
MVSKKDKQIHSDHNPQDASPVEWAEIRHKLLAFQENIQSGSDIDARSDDPQMCGLYVSDIYEYLRELEVKPKLRPLHDYIEKIQEDITPSKRGVLVDWLVEVAEEFELVSETLYLTVSYIDRFLSLKMVNEHWLQLVGVSAMFIASKYEEKRRPKVEDFCYITANTYTKQDVLKMEEDILLALEFELGRPTTNTFLRRFIRVAQEDFKVPNLQLEPLCCYLSELSMLDYSCVKFVPSLLAASAVFLARFIILPNQHPWSQMLEECTKYKAADLQVCVEIMLDLYLSRSEGASKAVREKYKQHKFQYVAAIPVYQELPVTFWEDVVTI

SEQ ID NO: 821 - DNA, 1332 bp, Sorghum bicolor
  misc_feature: Ceres ANNOT ID no.6100259
  misc_feature: Encodes the peptide sequence at SEQ ID NO. 806
atgggagggtccgggaagtgggtcaagtcgctcatagggctcaagaagcccgacaaggaagactgctgcaaggaaaagctgcaattcccatcagtgcatggaggactgcgaggcaagggccgcaagtggaagctgtggcggacctcctccggcgaccagggctccatctggcgcggctccagaggcggcagccagcgctcggcggcgtcggaggcctcggacgacgcgtcctcggtggccgcccccgccgacccgttcacggccgccgtcgccaccgtcacccgcgccccggcgcgggacttcatggccgtccgccaggagtgggccgccatccgcatccagaccgcgttccgcgggttcttggctcgccgtgcgctgagggcgctcaaggggctggtgcggctgcaggcgatcgtgcgcgggcggcaggtgcggaagcaggcggcggtgacgctgcgctgcatgcaggcgctggtgcgggtgcaggcgcgcatccgggcgcgccgcgtgcgcatgtccaccgagggccaggccgtgcagaagctgctcgaggcgcgccgtacccagatggacatcctcagggaagcagaggaaggatggtgtgacagtcaggggacacttgaacaagtgagggtgaagctgcagaagcggcaggagggcgcaatcaagcgcgagcgagctattgcgtacgcatattcacagcaggctgatggtgctgccaaatgcaatccaccgaagcttacttccaatggccgggtgaacccctccggtatgctgctcaagcaccagaattttgacaagagcaatgtcaactggagctggctggagaggtggatggcagcacgcccatgggagaatagattgatggaggagcacaaccagaccaactccagctcccctgacttccggtcctccaagaactgcgaggattcttttggtgtgctcggcgatttctctgaaccaaattcagtgaaggtgcgcaagaacaatgtcagcaaacgggtctgtgcaaaaccacctgggccaacacacgcccatggacatcatcagcgcctcaaagcccagtcgatctcgtctctgagcactgaactgcacaacgatgagagctctgcatcatcgtcgtcttgtttcgcatcgacccctatatcattctccacatttgtgacttcagagaagaccgaggacaatgtcaggacgagacccaactacatgagcatgacagagtcgatcaaggcgaagcagaaggcatgcaacgcccagagaacggtggcgctgaagcagtcagatgataggaaagtcatgagcgctgagttgatggccgctcaggtgtga

SEQ ID NO: 822 - protein, 348 aa, Glycine max
  misc_feature: Public GI ID no.857393
  misc_feature: Bit score of 198.8 for HMM based on sequences of FIGURE 9.
  misc_feature (214)..(341): Pfam Name: Cyclin_C Pfam Description: Cyclin, C-terminal domain
  misc_feature (83)..(212): Pfam Name: Cyclin_N Pfam Description: Cyclin, N-terminal domain
  misc_feature: Functional Homolog Of Ceres SEEDLINE ID no. ME08564 at SEQ ID NO. 764
METRAAAKRKANAAIVVVVEKQHPKRQRVVLGELPNLQNLIVSKIQNPRKEKLQCRKNPNANKPSPTNNTLSSPQLDGSYVSDIHEYLREMEMQKKRRPMVNYIEKFQKIVTPTMRGILVDWLVEVAEEYKLLSDTLHLSVSYIDRFLSVNPVTKSRLQLLGVSSMLIAAKYEETDPPSVDEFCSITDNTYDKAEVVKMEADILKSLKFEMGNPTVSTFLRRYANVASDVQKTPNSQIEHLGSYIGELSLLDYDCLRFLPSIVAASVIFLAKFIIWPEVHPWTSSLCECSGYKPAELKECVLILHDLYLSRKAASFKAVREKYKHQKFKCVANLPTPPYVPSCYFEDQ

SEQ ID NO: 823 - DNA, 1498 bp, Glycine max
  misc_feature: Ceres CLONE ID no.561499
  misc_feature: Encodes the peptide sequence at SEQ ID NO. 824
attcacccaacacttcaactccatcttcttccatccatttcctctttctcgatctgttccaaattcacttcacacacaggaaagaagatggagactcgcgccgccgcaaagagaaaggcaaatgccgccaccatagtctttgtcgaaaaacaataccccaacaagaggcagcgggttgtgttgggtgaacttcccaatttacaaaaccttattgtctccgaaactcaaaattcgcgcaaagagaagctcctatgtcggaagaatcccaatgagaagaaaccatcacccacaaacaacaacacctttccttcccctcagatcaacgaatcttatgattcggatatccacgggtatcttcgtgaaatggagatgcagaataagagaagaccaatggttgactacattgaaaaggttcagaaaattgttaccccaaccatgagagcaatattggtggattggttagtggaggtagctgtggagtacaagcttctatcggatactcttcatctctctgtatcatacatcgataggtttttatcagttaatccagtcagtaaatccagacttcagttactgggtgtttcgtccatgctcattgctgcaaaatatgaggagatggatccacctggtgtggacgagttttgcagcatcactgatcacacttatgacaagacagaggttgtgaagatggaagctgacatacttaagtccctaatgtttgaaatgggaaatcctactgtaagcacctttctaaggaggtatgctgatgttgcttctaatgaccaaaaaactccaaatttgcagattgaatttttgggcagctatattggcgagctaagtttgttggactatgattgtttaagattcttgccttctattgtggctgcctcggttatatttcttgccaagttcattatctgtcctgaagtgcatccatggacttcttccttgtgtgaatgctcgggttacaagccagctgagttgaaagaatgtgtccttatcttgcatgacttgtatttgtcaagaaaggcagcatccttcaaagctgttcgggcaaaatacaagcagcaaaagttcgaatgtgtggcaaacctgcctacccctccatatgtaccgagttgttactttgaagaccagtggtgcagtgaattccttgataaatgatcaaaccgaccattgcttgcatgggcatggcttagaaatttgatgcgtaggtttttgtctttgaattgcaagagcaacaggatttcattagataccaaagttcaattcccattcctgatgaactatcagggagaagacctttaaataaggatcaaataacaagatcttagaatgtacaactgcatacttgcaacatgtattaggagaattacggtgtaggatgaaccgaaaattgcattgttcttacagagaatttttatcttagtgaagtagtttttagacatatttgttaggaattttataatttttaattaattaatatggattatatatt

SEQ ID NO: 824 - protein, 358 aa, Glycine max
  misc_feature: Ceres CLONE ID no.561499
  misc_feature: Bit score of 184.3 for HMM based on sequences of FIGURE 9.
  misc_feature (216)..(343): Pfam Name: Cyclin_C Pfam Description: Cyclin, C-terminal domain
  misc_feature (85)..(214): Pfam Name: Cyclin_N Pfam Description: Cyclin, N-terminal domain
  misc_feature: Functional Homolog Of Ceres SEEDLINE ID no. ME08564 at SEQ ID NO. 764
METRAAAKRKANAATIVFVEKQYPNKRQRVVLGELPNLQNLIVSETQNSRKEKLLCRKNPNEKKPSPTNNNTFPSPQINESYDSDIHGYLREMEMQNKRRPMVDYIEKVQKIVTPTMRAILVDWLVEVAVEYKLLSDTLHLSVSYIDRFLSVNPVSKSRLQLLGVSSMLIAAKYEEMDPPGVDEFCSITDHTYDKTEVVKMEADILKSLMFEMGNPTVSTFLRRYADVASNDQKTPNLQIEFLGSYIGELSLLDYDCLRFLPSIVAASVIFLAKFIICPEVHPWTSSLCECSGYKPAELKECVLILHDLYLSRKAASFKAVRAKYKQQKFECVANLPTPPYVPSCYFEDQWCSEFLDK

SEQ ID NO: 825 - protein, 681 aa, Oryza sativa subsp. japonica
  misc_feature: Public GI ID no.115435502
  misc_feature: Bit score of 234.6 for HMM based on sequences of FIGURE 9.
  misc_feature (396)..(505): Pfam Name: Cyclin_N Pfam Description: Cyclin, N-terminal domain
  misc_feature (521)..(646): Pfam Name: Cyclin_C Pfam Description: Cyclin, C-terminal domain
  misc_feature: Functional Homolog Of Ceres SEEDLINE ID no. ME08564 at SEQ ID NO. 764
MALVCAECRLVDIVRVHANLMVPEMEIQLGEEVGVAKFIKQFVENQNGKHVLGSHRVEGSVVHVEAPWLVDQQNRRREWRRVGADGELVSALFLQFVVLKLWVAIRSNHYRGLAGLEVDVMIDGSGRWEAGWSAKRSSNSASKDGRRSSACSAAQLRSRAKQSTSNTSVATYRRSPCTTPAPRMRSLSATTTRRPWRTGWRGRPMRWASLVVMKLCVEAGVNKGHHLLGRDTRHEAHRASAIDTENRVERDVWFIGVVCVVPFAEISRGVVVLKRPCLQRSGNSAGERQRNWCPGTSQGHGLLEILGLLELDIDADVVGEPRCEELNLLAVGEEVGRAATQRQKALLVRRHRANLSEMLEFTQGIVADRRSILTVTELLERIPIRRTHVLLIMEVPFLCSSSEMTRKRPSTDFMETIQKDVNPSMRAILIDWLVEVAEEYRLVPDTLYLTVNYIDRYLSGNEINRQRLQLLGVACMLIAAKYEEICAPQVEEFCYITDNTYFRDECWNESNSNNSLIAYNRRFVRVAQVSDELFIVQDPALHLEFLANYVAELSLLEYNLLSYPPSLVAASAIFLAKFILQPTKHPWNSTLAHYTQYKSSELSDCVKALHRLFSVGPGSNLPAIREKYTQHKILHAADVIDLNMANAFKNVKILCQCPCQCNLLEEVMLKLFPYWKLSTAV

SEQ ID NO: 826 - protein, 531 aa, Oryza sativa subsp. japonica
  misc_feature: Public GI ID no.125569641
  misc_feature: Bit score of 234.6 for HMM based on sequences of FIGURE 9.
  misc_feature (246)..(355): Pfam Name: Cyclin_N Pfam Description: Cyclin, N-terminal domain
  misc_feature (371)..(496): Pfam Name: Cyclin_C Pfam Description: Cyclin, C-terminal domain
  misc_feature: Functional Homolog Of Ceres SEEDLINE ID no. ME08564 at SEQ ID NO. 764
MMSTQLRSRAKQSTSNTSVATYRRSPCTTPAPRMRSLSATTTRRPWRTGWRGRPMRWASLVVMKLCVEAGVNKGHHLLGRDTRHEAHRASAIDTENRVERDVWFIGVVCVVPFAEISRGVVVLKRPCLQRSGNSAGERQRNWCPGTSQGHGLLEILGLLELDIDADVVGEPRCEELNLLAVGEEVGRAATQRQKALLVRRHRANLSEMLEFTQGIVADRRSILTVTELLERIPIRRTHVLLIMEVPFLCSSSEMTRKRPSTDFMETIQKDVNPSMRAILIDWLVEVAEEYRLVPDTLYLTVNYIDRYLSGNEINRQRLQLLGVACMLIAAKYEEICAPQVEEFCYITDNTYFRDECWNESNSNNSLIAYNRRFVRVAQVSDELFIVQDPALHLEFLANYVAELSLLEYNLLSYPPSLVAASAIFLAKFILQPTKHPWNSTLAHYTQYKSSELSDCVKALHRLFSVGPGSNLPAIREKYTQHKILHAADVIDLNMANAFKNVKILCQCPCQCNLLEEVMLKLFPYWKLSTAV

SEQ ID NO: 827 - protein, 396 aa, Medicago truncatula
  misc_feature: Public GI ID no.87241424
  misc_feature: Bit score of 263.4 for HMM based on sequences of FIGURE 9.
  misc_feature (280)..(385): Pfam Name: Cyclin_C Pfam Description: Cyclin, C-terminal domain
  misc_feature (94)..(223): Pfam Name: Cyclin_N Pfam Description: Cyclin, N-terminal domain
  misc_feature: Functional Homolog Of Ceres SEEDLINE ID no. ME08564 at SEQ ID NO. 764
MEPKSVNPTRRPQREAKKKAVAALCEQQRKRKRVPLGEITNDVNTNANANANDVVLPTQKKRNVSTSSNSDGTPVPEKLEKFEDPQLCETYVSDIYDYLRNMEVDSSKRPLCDYIQKVQRDVNASMRGVLVDWLVEVAEEYKLVSDTLYFSVSYIDRFLSLNDLTRQKLQLLGVASMLVASKYEEIKPPEVEDFCYITDNTYSKEEVLTMEADILKSLKFELGGPTIKTFLRHVCFIDYVSLYVEWYYCFCIVAHISFSFSVCRRFITKVGLEGVDASELQFEFLCSYLAELSLLDYNCVKFLPSMVAASVVFLARFMLSPKTHPWNSAIYEFTRYKPADLKECVLNIHDLYLGRKGGSLQAVRDKYKQHKFKCVATTPSPPEISLSFFEFRGADP

SEQ ID NO: 828 - DNA, 1170 bp, Populus balsamifera subsp. trichocarpa
  misc_feature: Ceres ANNOT ID no.1514366
  misc_feature: Encodes the peptide sequence at SEQ ID NO. 829
atgagcgagaacgagaatcacgtgcaatccacgcgctcatcatcatcatcatccaggaaacgggccccaaaggctcaccaccctctgccaccctccaagaagaagcgagtcccattgggtgaactcacaaactctctccatatcaccaccaacaactcggattgcaatatcagcgagtctaagtatgcagccaaagcggatgacttgccaccaccaagtactgagtcaagtcgagactcggatttcgagaccaccccgaagattgaatgtgaagtgaaggaggggaatcataacgatttagaaaagtttccgagcgctgagtccattcaaaaatcagggttaaggaggtgttcttacacttcctctatctatcgatatcttcactccttggagatggagggcaatagaaggtgcttgtcaaattacatgcgggaggtgcagaatgatgtatcaggcaatatgcgggaaattctagtggattggttagtggaagttgcagaagaatacagacttgtctcagacaccctttatctcactgtatcgtatatcgataggtttctatcttcacaggctttgagtaggaacaatctacagcttcttggtgtttcttgcatgcttattgcctcgaagtatgaagagattagtcctccacatgtcgagagcttttgccacataacagacaacacttacaccaaggatcaggtacttgatatggagaaacaagtacttaaatccttgaactatgaaatgggtgctcctacaacaataaattttctcaggcaatcttctgatttgcaattcgagctcttgagttgttatctggcggagctaagtttgttagaatatgggtgcatgtgcttcttaccatcaatgattgctgcatcagctgttttcctttcaagtttcacgatccagccacagatgcatccttggagtatggcattgcagcgtcattcaggttacagaccatctgacctaaaggaatgtgttcttgctattcatgacattcaattaaatagaaaaggaagctcttcgcgagcagtgagagataaatacacacagaacaagtttaagcatgtggcaactttatctcctccctcagaagttcctgggcgttactttgcggccatcaatgagttatgctctgtgagattctcaagaatgcgttga

SEQ ID NO: 829 - protein, 389 aa, Populus balsamifera subsp. trichocarpa
  misc_feature: Ceres ANNOT ID no.1514366
  misc_feature: Bit score of 285.4 for HMM based on sequences of FIGURE 9.
  misc_feature (122)..(251): Pfam Name: Cyclin_N Pfam Description: Cyclin, N-terminal domain
  misc_feature (253)..(370): Pfam Name: Cyclin_C Pfam Description: Cyclin, C-terminal domain
  misc_feature: Functional Homolog Of Ceres SEEDLINE ID no. ME08564 at SEQ ID NO. 764
MSENENHVQSTRSSSSSSRKRAPKAHHPLPPSKKKRVPLGELTNSLHITTNNSDCNISESKYAAKADDLPPPSTESSRDSDFETTPKIECEVKEGNHNDLEKFPSAESIQKSGLRRCSYTSSIYRYLHSLEMEGNRRCLSNYMREVQNDVSGNMREILVDWLVEVAEEYRLVSDTLYLTVSYIDRFLSSQALSRNNLQLLGVSCMLIASKYEEISPPHVESFCHITDNTYTKDQVLDMEKQVLKSLNYEMGAPTTINFLRQSSDLQFELLSCYLAELSLLEYGCMCFLPSMIAASAVFLSSFTIQPQMHPWSMALQRHSGYRPSDLKECVLAIHDIQLNRKGSSSRAVRDKYTQNKFKHVATLSPPSEVPGRYFAAINELCSVRFSRMR

SEQ ID NO: 830 - DNA, 1497 bp, Sorghum bicolor
  misc_feature: Ceres ANNOT ID no.6016012
  misc_feature: Encodes the peptide sequence at SEQ ID NO. 899
atgggtaagaaaggaaagtggtttagtgcggtgaagaaagtcttcagctcctctggtacagatggaaaggaagcaaaggctgagaaagcagacaagtcaaaatccaagaggagatggccattcggaaaaacgaagaagcactccgagccttcgatctcaacggtggcagggactgctccggtagctccgttgccatcaccaccaccaactcagccccactctctggagattaaagatgtcaatccacttgaaacagacagtgagcagaacaagcatgcctactctgttgcgcttgcatctgctgtcgctgctgaagctgcagcggttgctgcccaggctgctgcggaggttgtccgcctcacagcagttaccacggctgcaccaaaaatgcctgttagttcaatggaagaacttgctgccaccaagattcagactgccttcaggggttatctggcaaggagagcattgcgggcactaagagggctagttagattgaagtcgcttgttgatggaaatgctgtcaaacgccaaaccgctcacaccttgcaatgcacacaaacaatgacaagagttcaaactcaaatctattctagaagggtgaagttggaggaggagaaacaggctcttcaaaggcagctccaattgaaacatcaaagagaacttgagaaaatgaagattgatgaagactgggatcacagccatcaatccaaagagcaaattgaggccaaccttatgatgaaacaggaagctgcaatgagacgagaaagagcccttgcatatgcattttctcaccagtggaggacttctggtcgaactataacccctacttttacggaacctgggaaccctaactggggctggagctggatggaacgctggatgaccgctagaccttgggagagccgattggtggcatcagacaaggatcctaaagaacgtgctctgacaaagaatccaagcaccattactgttcaagccgcatctgtaccccgtgccatctcaatccagagaccagctacaccaaacaagtcaagccggccaccaagccggcagtcaccttcaactccaccatcgaaggccccatcaacctcaggaaagaccaggccagcaagtccaaggggcaattggctgtacaaggaggatgacctgaggagcatcacaagcatccgctctgagcgcccaaggaggcagagcacaggtggaggaggctcagtccgggatgatgcaagcctgacgagcacaccacctctccccagttacatgcaatcgacagagtctgcaagggcgaagtctcgataccgcagtctactgactgagaagcttgaggttcctgagagagcacctttggtccactctgttgttaagaagcgcctgtcgttccctgtcgtcgataagccaagtgttgtgccgacagataagccaaaggaaagagtgagacgccattcagatcctccgaaggtcgatcctgcaacactgaaggatgtccctgctgcttga

SEQ ID NO: 831 - protein, 473 aa, Sorghum bicolor
  misc_feature: Ceres ANNOT ID no.6054472
  misc_feature: Bit score of 1104.8 for HMM based on sequences of FIGURE 16.
  misc_feature (107)..(127): Pfam Name: IQ Pfam Description: IQ calmodulin-binding motif
  misc_feature: Functional Homolog Of Ceres SEEDLINE ID no. ME24091 at SEQ ID NO. 922
MGKKGKWFGAVKKVFSPESKEKKEERLRRKSAASNPAPLDLTPSTSLEVNVSVPPPPAPAPPPVLHQAEEVRVPEPEQEQSKHVTVEEPPAVPAQPSVLPPGVPTEELAAVKIQTAFRGYLARRALRALRGLVRLKSLVEGNSVKRQSASTLRCMQTLSRVQSQIRSRRAKMSEENQALQRQLLLKQELENFRMGENWDDSTQSKEQIEASLISRQEAAIRRERALAYAFSHQWKSTSRSVNPMFVDPNNLQWGWSWLERWMAAKPWEGRNGADKESNFDRGSVKSMSLNLGEGEITKAFNRRDSKPEKPSPPTPKPTRPAWQSPSTPSAKVAPIPARRKSATPKNGLSQVDDDARSVLSVQSERPRRHSIATSTVRDDESLASSPSLPSYMVPTESARAKSRLQGSSMTNGAETPEKGGSTGPVKKRLSFQGGTAAASPMRRHSGPPKVESAVKDIVAPPQPEALVVNGGSK

SEQ ID NO: 832 - protein, 469 aa, Glycine max
  misc_feature: Public GI ID no.857395
  misc_feature: Bit score of 1007.6 for HMM based on sequences of FIGURE 9.
  misc_feature (207)..(334): Pfam Name: Cyclin_N Pfam Description: Cyclin, N-terminal domain
  misc_feature (336)..(463): Pfam Name: Cyclin_C Pfam Description: Cyclin, C-terminal domain
  misc_feature: Functional Homolog Of Ceres SEEDLINE ID no. ME08564 at SEQ ID NO. 764
MDKVNRVCAKDEERPLRITRARARALRGITPYSRPSLKNEQKNVLRANSKRAASSGNKTFAVVPAVVQQKGRAVLSDISNMCAKPHDKCTKASKFQAKGVCTKKNTKLAASSVSTDVSSSHDDVRAKLAEELSTIKMVESNDTLREGVTADTSLSMQNSVKSDELRNSPNKDIDIICEKLGASDSLTIVDIDSELKDPQLWSFYAPDIYSNIRVTELQRKPLTNYMDKLQKDINPSMRGILVDWLVEVSEEYKLVPDTLYLTVNLIDRYLSTRLIQKQKLQLLGVTCMLIASKYEEMCAPRVEEFCFITDNTYTKEEVLKMEREVLNLVHFQLSVPTIKTFLRRFIQAAQSSYKAPYVELEFLANYLAELALVECSFFQFLPSLIAASAVFLAKWTLNESEHPWNPTLEHYTKYKASDLKTVVLALQDLQLNTKGCFLNAVREKYKQQKFNCVANLSPKSVQSLFQNQV

SEQ ID NO: 833 - DNA, 1329 bp, Glycine max
  misc_feature: Ceres CLONE ID no.533924
  misc_feature: Encodes the peptide sequence at SEQ ID NO. 834
atcaaaatttcaggccaaaggagtttgtacaaagaaaaacaccaagcttgcagcctcaagtgtttccactgacgtttcatcctcacatgacgatgttagagcaaagttagctgaagaattatccacaataaagatggttgaatcaaatgacaccttaagagaaggtgtaacagcagacacctcactttcaatgcaaaactctgtgaaatctgatgaactccggaactctccaaacaaagacatagatataatttgtgagaagctgggagcctcagactccctgactattgtggacattgattcagagttaaaggatcctcaactgtggagtttttatgcccctgacatatacagcaatattcgagtcacagagcttcaaaggaaaccattgaccaactacatggacaagttgcagaaagatattaatccaagcatgcgtggaattctggttgattggcttgtggaggtttctgaggaatacaagttggttccagacactctttacctgaccgtgaacctcattgatcggtatctctcaacaagactcattcagaagcaaaagctccagttgctcggtgttacttgcatgttgattgcatcaaaatatgaagagatgtgtgcacctcgagtggaggaattttgcttcatcacagataatacatacacaaaagaagaggtattgaaaatggagagagaagtactgaatcttgtgcattttcagttatctgtccccacaatcaaaacttttctcaggagattcatccaagcagcacaatcttcttacaaggctccttatgttgaactggaattcctggcaaattatttagcagagcttgctcttgttgaatgcagcttcttccagtttctaccttcccttatagctgcatctgctgtgttccttgccaaatggaccctgaatgagtcagaacatccatggaatccaactctggagcactatacaaaatacaaagcttcagacctcaaaactgttgttcttgcactgcaagatctgcaacttaataccaaaggatgcttcctgaatgctgtccgcgagaagtataagcaacagaagttcaattgtgtggcaaacttgtctccaaaatcgttgcagtcactcttccagaaccaagtgtctctttgttttgcaaagggaaaactgttgcgggatgatacagttcaaagagtgagttgatgtactaacaccaattagagactcattttaaggttctcattaagcaacaaagtcgtatagttcctttcaacattttgtaccgaaacatttgtatgtaattcaaattacattacctacaatttatttttcatttctag

SEQ ID NO: 834 - protein, 352 aa, Glycine max
  misc_feature: Ceres CLONE ID no.533924
  misc_feature: Bit score of 715.8 for HMM based on sequences of FIGURE 9.
  misc_feature (200)..(327): Pfam Name: Cyclin_C Pfam Description: Cyclin, C-terminal domain
  misc_feature (71)..(198): Pfam Name: Cyclin_N Pfam Description: Cyclin, N-terminal domain
  misc_feature: Functional Homolog Of Ceres SEEDLINE ID no. ME08564 at SEQ ID NO. 764
MVESNDTLREGVTADTSLSMQNSVKSDELRNSPNKDIDIICEKLGASDSLTIVDIDSELKDPQLWSFYAPDIYSNIRVTELQRKPLTNYMDKLQKDINPSMRGILVDWLVEVSEEYKLVPDTLYLTVNLIDRYLSTRLIQKQKLQLLGVTCMLIASKYEEMCAPRVEEFCFITDNTYTKEEVLKMEREVLNLVHFQLSVPTIKTFLRRFIQAAQSSYKAPYVELEFLANYLAELALVECSFFQFLPSLIAASAVFLAKWTLNESEHPWNPTLEHYTKYKASDLKTVVLALQDLQLNTKGCFLNAVREKYKQQKFNCVANLSPKSLQSLFQNQVSLCFAKGKLLRDDTVQRVS

SEQ ID NO: 835 - DNA, 1856 bp, Gossypium hirsutum
  misc_feature: Ceres CLONE ID no.1928887
  misc_feature: Encodes the peptide sequence at SEQ ID NO. 836
gtgagcttagggagctgatacaaacaaagtgagaatttttttttaaagttcctctctcgacctatccgaacctcttcgttttcgatctcggagttcgtcgaagcacaaaatgcaggttcaatgacaaacttttcaatttgaaaatcatacatcgctctgggaaaaggcaagcaagtatgaataaagaaaatgaacctaccgaagaagttgaagagcctacaggaagaattacgcgagcaaggtataaagccttgcgggcggctggaggaatatgctcctcctcaaaaccatctttcaaacaggaacagaaacgtgttcttcgattgaactccaaaagagcagcatcagatgagaacaaggcttctgtgcctgctactgttggccttcagcctaaaagaagggcagtgcttaaaaatgtaaccaatgtcggcgatgacactttgtacatggactgcacaaatgcaactaaaaatcggatcaccaagcagaccattacagaccataatgagaagaacacagaaatgtttgaggatattgccatggaaatcccatcagctgaagaggatgtgaaagctaaattagctgattccttatcgaaaataaggatggtggaaacgcaagaaatcactttaccagtaataccggaggaaagagaattactggaatctaagtgttgtgcaaaagaacgtgctactgcagatgcaatgcctccaaaacatatttccgcaatggatgttgaagagcaaagccatcagaaaatagatcaaaacgaggcttgcaagaaactaggagcctcgaaagatgtcgtggatattgattccaacctaaaagatcctcaagcatgtggcttgtatgccccagacatatacaataacatgcgtgttactgagcttaaccaaagaccctcaacaaattatatggaacagttgcagcgggatattaccccaagcatgcgaggaattttggttgactggttagttgaggtttctgaagaatataagttagtcccagacacgctttacctcaccgtgagcctcattgatcgttttctttctcacaattttatagaaaaacaaaggctccagctacttggcgttgcttgcatgctaattgcctcaaagtatgaagagatttgtgcaccaagagtggaagaattttgcttcatcactgataatacctacacaagagaagaggtgctgaaaatggagagcaaagttctaaacttcttgtattttcagttgtcagttccaaccacaaaaacatttctcaggagattcattcaagcagcacaagcaagttacaaggttccttgtttagaactagagttcttagccaagtatttagcagagttgactcttcttgagtacagcttcttaaagttcttaccttcaaacatcgctgcatctgctgttttccttgccagatggactctcaatcaatcagaccatccatggaacccaaccctggagcattacactagttataaagcatcagagctgaaaaatacggttcttgcattggaagatctgcagctcaacactaatggttgctccctgaatgctatacgcgagaagtataggcaacagaagttcaaatgtgtagcaatgatgacttccccggaaagtgttggatcagtctttttaagatgaagaagaaagctgatttaatgttctaaaccattccccctcttggagaatgaatctgatccaaatatttaaaaatattactttttttttttaagttgtccgttttgttgtaacattttgtctgtcaagttctggtgcttccagacctactgtaaccttgtaacattctacaccatcgatctttattttcttttgtcttttagagctttc

SEQ ID NO: 836 - protein, 490 aa, Gossypium hirsutum
  misc_feature: Ceres CLONE ID no.1928887
  misc_feature: Bit score of 1309.4 for HMM based on sequences of FIGURE 9.
  misc_feature (229)..(356): Pfam Name: Cyclin_N Pfam Description: Cyclin, N-terminal domain
  misc_feature (358)..(485): Pfam Name: Cyclin_C Pfam Description: Cyclin, C-terminal domain
  misc_feature: Functional Homolog Of Ceres SEEDLINE ID no. ME08564 at SEQ ID NO. 764
MNKENEPTEEVEEPTGRITRARYKALRAAGGICSSSKPSFKQEQKRVLRLNSKRAASDENKASVPATVGLQPKRRAVLKNVTNVGDDTLYMDCTNATKNRITKQTITDHNEKNTEMFEDIAMEIPSAEEDVKAKLADSLSKIRMVETQEITLPVIPEERELLESKCCAKERATADAMPPKHISAMDVEEQSHQKIDQNEACKKLGASKDVVDIDSNLKDPQACGLYAPDIYNNMRVTELNQRPSTNYMEQLQRDITPSMRGILVDWLVEVSEEYKLVPDTLYLTVSLIDRFLSHNFIEKQRLQLLGVACMLIASKYEEICAPRVEEFCFITDNTYTREEVLKMESKVLNFLYFQLSVPTTKTFLRRFIQAAQASYKVPCLELEFLAKYLAELTLLEYSFLKFLPSNIAASAVFLARWTLNQSDHPWNPTLEHYTSYKASELKNTVLALEDLQLNTNGCSLNAIREKYRQQKFKCVAMMTSPESVGSVFLR

SEQ ID NO: 837 - DNA, 1647 bp, Populus balsamifera subsp. trichocarpa
  misc_feature: Ceres ANNOT ID no.1531064
  misc_feature: Encodes the peptide sequence at SEQ ID NO. 838
atgaataaagaaaatgcaactgctgccaaacatgaagagcccactactcgaattacacgggcacgtgctaaagcttcggggacttcagtaggattatttcctgcctcaaaaccctcctttaaacaggatcaaaagcatcctcttagagaaaagaccaaaagagcagcatcagatgagaacaaatcttgttcaacctcagttgctggtcttaagcataagagaagggcagtgcttaaagatgtgaccaacgtcctttgtgagaattctcatctgaactgcaacattgcaacaaaacaacatactagcaaacaagctagaaaatgtcctcgaaataagaatgcagaggtggctgctcatatctccatggaaatttcaccggctcaggaggatgtaaaagaaatgttagctgaagagctgtcaaaaataagaatgggggaagcacaagattttacttcaccagcaaagttagaaggaaaaaaacaaagcgattgtcatggcacaagagaaggtggtgtagcagatccaaggcttctagtacctctttccacaaaaacttccggagttgaaaggcctctaaagaaagaagaaagtgaaatttctgagaaactggatgcctcagttggcgtgagcgtagtggatattgattcaaacataaaagaccttcaactctgcagcttgtacgcccctgatatatttaacaatatacgtgctaaggagcttgaccaaaggccttcgattgattacatggagaagttgcagcatgatattagtcctagcatgcgaggaattctgatcgactggcttgtggaggtttctgaagaatatacattggttccagatacactttacctcactgtcaatctcattgatcgattcctctcacagaactatattgaaaaacaaagactccaactgcttggtgttacttgcatgttgattgcctctaagtatgaagaaatttgtgcgccaagagtggaagagttttgcttcatcactgacaatacttacacaagaggagaggttctgaagatggagagtcaagtcctgaatttcttgcactttcatttatcagttcccaccacgaaatcatttctgaggagattcattcaagcagcccaagcttcctgcaaggtcccttgtgtcgagctggagttcttggcaaattatctagcagagttgactcttgttgagtacaacttcctaaagttattaccttccctcatagccgcatctgttgtttttcttgcccgatggacactcaatcaatcagaccacccatggaactcaacactagagcactacactagttacacaacatcagaactgaaaactacagtgcttgccctggaagatttgcagctgaacactgatggttgttgcctaaatgctatacgggacaaatatagacaacagaaggtaaagaactcgtactatttggagagactgtatgcaagcttctgggcttcacatttcccttttatgtcattctcacaaatggttgtcgttgtggcagttcaaatccgtagcaactttgacctccgtacaacgagtttcatcgcttttctgaggacgaaggaaaacgggtcctgcattaacaagcaaaccgctccctctgagggtgatatcgactctaatcatagaatttaa

SEQ ID NO: 838 - protein, 548 aa, Populus balsamifera subsp. trichocarpa
  misc_feature: Ceres ANNOT ID no.1531064
  misc_feature: Bit score of 1162.7 for HMM based on sequences of FIGURE 9.
  misc_feature (230)..(357): Pfam Name: Cyclin_N Pfam Description: Cyclin, N-terminal domain
  misc_feature (359)..(486): Pfam Name: Cyclin_C Pfam Description: Cyclin, C-terminal domain
  misc_feature: Functional Homolog Of Ceres SEEDLINE ID no. ME08564 at SEQ ID NO. 764
MNKENATAAKHEEPTTRITRARAKASGTSVGLFPASKPSFKQDQKHPLREKTKRAASDENKSCSTSVAGLKHKRRAVLKDVTNVLCENSHLNCNIATKQHTSKQARKCPRNKNAEVAAHISMEISPAQEDVKEMLAEELSKIRMGEAQDFTSPAKLEGKKQSDCHGTREGGVADPRLLVPLSTKTSGVERPLKKEESEISEKLDASVGVSVVDIDSNIKDLQLCSLYAPDIFNNIRAKELDQRPSIDYMEKLQHDISPSMRGILIDWLVEVSEEYTLVPDTLYLTVNLIDRFLSQNYIEKQRLQLLGVTCMLIASKYEEICAPRVEEFCFITDNTYTRGEVLKMESQVLNFLHFHLSVPTTKSFLRRFIQAAQASCKVPCVELEFLANYLAELTLVEYNFLKLLPSLIAASVVFLARWTLNQSDHPWNSTLEHYTSYTTSELKTTVLALEDLQLNTDGCCLNAIRDKYRQQKVKNSYYLERLYASFWASHFPFMSFSQMVVVVAVQIRSNFDLRTTSFIAFLRTKENGSCINKQTAPSEGDIDSNHRI

SEQ ID NO: 839 - DNA, 1596 bp, Populus balsamifera subsp. trichocarpa
  misc_feature: Ceres ANNOT ID no.1455474
  misc_feature: Encodes the peptide sequence at SEQ ID NO. 840
atgaacaaagaaaatgcaactactgccaaacttgaagagcccgctactcgaattacacgggcacgtgctaaagccttgggggcttcggtaggaatatatcctgcctcaaaaccctccttcaagcaggagcagaggcatcctcttagagcaaagaccaaaagagcagcatcagatgagaataaatctgcttcgacctcgattgctggctttaagcataagagaagggcggtgcttaaagatgtgagcaacatcttttgtgagaattctcatcaaaactgcatccatgcaactaaacaatatactagtaaactagctagaaaatgtcctccgaaaacaaatgcagaggtggctgctcgtatctctatgaaaatttcaccggttcaggaggatgtaaaagaaaagttagctgaagagctgtcaaaaataagaatgggagaagcacaaaattttacttcaccagcaaagttagaggtaaaacaagatagtttgtgtcatggcacaggagaaggtggtgtagcagatccgatgcttctaataccagtttccacaaaattttctggagttgaaagccctctaaagaaagaagtaaacgagatttcaaaaaaactggatgcctcaagtggtgcgagcgtagtggatattgatttaaacataaaagaccctcagttctgcagcttgtatgcccctcatatatataacaatatacgtgtgaaggagcttgacctaagaccttcagttgattacatggaaaagttgcagcgcgatatcagtccaggaatgcgaggaattctgattgactggcttgtggaggtttctgaagaatatacgttggttccagatactctttacctcactgtcaatctcattgatcgattcctctcacagaactatattgaaaaacaaagactccaactgcttggtgttacttgcatgttaattgcctctaagtatgaagaaattattccgccaagagtggaagggttttgcttcatcactgacaatacttacacaagaggagaggttctgaaaatggagagtcaggtcctgaatttcttgtactttcagttatcagttcctaccacgaaaacattcctgaggagattcattcaagcagcacaagcttcttgcaaggttccttgtgtcgaactggtgttcttggcaaattatttggcagagttgactcttgttgagtacaacttcctaaagttcttaccttccctcatagctgcatccgctgtttttcttgcccgatggacactcaatcagtcagatcatccatggaactcaactcttgagcactacactagatacacagcatcagaactgaaaactacagtactttctctggaagatttgcagctgaacaccaatggttgttgcctaaatgctatacgcgacaaatatagacaacagaagttcgtgtcattctcacaattggttatcattgtgacagttcaaatctgtagcaacattgacctcagtgcgacgagtttcatcgcttttctgaagacgaagaaaaactggtcctgcattaacaagcacagcactctgattcgacactttgagggtgatatcgattctaatcatagagtttaa

SEQ ID NO: 840 - protein, 531 aa, Populus balsamifera subsp. trichocarpa
  misc_feature: Ceres ANNOT ID no.1455474
  misc_feature: Bit score of 1286.7 for HMM based on sequences of FIGURE 9.
  misc_feature (230)..(357): Pfam Name: Cyclin_N Pfam Description: Cyclin, N-terminal domain
  misc_feature (359)..(486): Pfam Name: Cyclin_C Pfam Description: Cyclin, C-terminal domain
  misc_feature: Functional Homolog Of Ceres SEEDLINE ID no. ME08564 at SEQ ID NO. 764
MNKENATTAKLEEPATRITRARAKALGASVGIYPASKPSFKQEQRHPLRAKTKRAASDENKSASTSIAGFKHKRRAVLKDVSNIFCENSHQNCIHATKQYTSKLARKCPPKTNAEVAARISMKISPVQEDVKEKLAEELSKIRMGEAQNFTSPAKLEVKQDSLCHGTGEGGVADPMLLIPVSTKFSGVESPLKKEVNEISKKLDASSGASVVDIDLNIKDPQFCSLYAPHIYNNIRVKELDLRPSVDYMEKLQRDISPGMRGILIDWLVEVSEEYTLVPDTLYLTVNLIDRFLSQNYIEKQRLQLLGVTCMLIASKYEEIIPPRVEGFCFITDNTYTRGEVLKMESQVLNFLYFQLSVPTTKTFLRRFIQAAQASCKVPCVELVFLANYLAELTLVEYNFLKFLPSLIAASAVFLARWTLNQSDHPWNSTLEHYTRYTASELKTTVLSLEDLQLNTNGCCLNAIRDKYRQQKFVSFSQLVIIVTVQICSNIDLSATSFIAFLKTKKNWSCINKHSTLIRHFEGDIDSNHRV

SEQ ID NO: 841 - protein, 493 aa, Nicotiana tabacum
  misc_feature: Public GI ID no.849072
  misc_feature: Bit score of 1246.9 for HMM based on sequences of FIGURE 9.
  misc_feature (234)..(361): Pfam Name: Cyclin_N Pfam Description: Cyclin, N-terminal domain
  misc_feature (363)..(490): Pfam Name: Cyclin_C Pfam Description: Cyclin, C-terminal domain
  misc_feature: Functional Homolog Of Ceres SEEDLINE ID no. ME08564 at SEQ ID NO. 764
MRHANIKHGSFHLEEHNMRITRARARVSGSSGRLPPLHPSTKQDKKQALGAESKRSKRSASDENRPGTSSIATGVQPKRRAVLKDMKNVLHENSHMNCINGSKIQVKKGSDKRNNKAKPAVSLKLSQLQEKGKEDIADKVKKVKVEGSQEISSGANCKEDMLPQLSRDVTPAQCGLVHLVPVNRSSCKAFPLQNVMKKDESKVCQKQEGFANLGIADIDSRHKDPLMCSLYAPDIYNNLHAIEFDRSPSVDYLEKLQLDINKGMRGILIDWLVEVSEEYRLVPDTLYLTVNLIDRFLSENYIEKQKLQLLGVTCMLIASKFEEICAPRVEEFCFITDNTYSKEEVIKMESRVLNLLSFQLASPTTKKFLRRFIQAAQASYKVPSVELEFMANYLAELTLVDYGFLKFLPSLTAASAVFLARWTLDQSNHPWNPTLEHYTRYKVSELRTTVFALQELQMNTSGCTLNAIREKYRQPKFKSVATLAASKPVQSLF

SEQ ID NO: 842 - DNA, 1716 bp, Populus balsamifera subsp. trichocarpa
  misc_feature: Ceres ANNOT ID no.1477575
  misc_feature: Encodes the peptide sequence at SEQ ID NO. 843
atgaataaagaaaatgcaactgctgccaaacatgaagagcccactactcgaattacacgggcacgtgctaaagcttcggggacttcagtaggattatttcctgcctcaaaaccctcctttaaacaggatcaaaagcatcctcttagagaaaagaccaaaagagcagcatcagatgagaacaaatcttgttcaacctcagttgctggtcttaagcataagagaagggcagtgcttaaagatgtgaccaacgtcctttgtgagaattctcatctgaactgcaacattgcaacaaaacaacatactagcaaacaagctagaaaatgtcctcgaaataagaatgcagaggtggctgctcatatctccatggaaatttcaccggctcaggaggatgtaaaagaaatgttagctgaagagctgtcaaaaataagaatgggggaagcacaagattttacttcaccagcaaagttagaaggaaaaaaacaaagcgattgtcatggcacaagagaaggtggtgtagcagatccaaggcttctagtacctctttccacaaaaacttccggagttgaaaggcctctaaagaaagaagaaagtgaaatttctgagaaactggatgcctcagttggcgtgagcgtagtggatattgattcaaacataaaagaccttcaactctgcagcttgtacgcccctgatatatttaacaatatacgtgctaaggagcttgaccaaaggccttcgattgattacatggagaagttgcagcatgatattagtcctagcatgcgaggaattctgatcgactggcttgtggagatgttgaacgggtatgagattgataatctatatgcactctttcaggtttctgaagaatatacattggttccagatacactttacctcactgtcaatctcattgatcgattcctctcacagaactatattgaaaaacaaagactccaactgcttggtgttacttgcatgttgattgcctctaagtatgaagaaatttgtgcgccaagagtggaagagttttgcttcatcactgacaatacttacacaagaggagaggcttctaacacgatactatggcaggttctgaagatggagagtcaagtcctgaatttcttgcactttcatttatcagttcccaccacgaaatcatttctgaggagattcattcaagcagcccaagcttcctgcaaggtcccttgtgtcgagctggagttcttggcaaattatctagcagagttgactcttgttgagtacaacttcctaaagttattaccttccctcatagccgcatctgttgtttttcttgcccgatggacactcaatcaatcagaccacccatggaactcaacactagagcactacactagttacacaacatcagaactgaaaactacagtgcttgccctggaagatttgcagctgaacactgatggttgttgcctaaatgctatacgggacaaatatagacaacagaaggtaaagaactcgtactatttggagagactgtatgcaagcttctgggcttcacatttcccttttatgtcattctcacaaatggttgtcgttgtggcagttcaaatccgtagcaactttgacctccgtacaacgagtttcatcgcttttctgaggacgaaggaaaacgggtcctgcattaacaagcaaaccgctccctctgagggtgatatcgactctaatcatagaatttaa

SEQ ID NO: 843 - protein, 571 aa, Populus balsamifera subsp. trichocarpa
  misc_feature: Ceres ANNOT ID no.1477575
  misc_feature: Bit score of 1118.6 for HMM based on sequences of FIGURE 9.
  misc_feature (230)..(380): Pfam Name: Cyclin_N Pfam Description: Cyclin, N-terminal domain
  misc_feature (382)..(509): Pfam Name: Cyclin_C Pfam Description: Cyclin, C-terminal domain
  misc_feature: Functional Homolog Of Ceres SEEDLINE ID no. ME08564 at SEQ ID NO. 764
MNKENATAAKHEEPTTRITRARAKASGTSVGLFPASKPSFKQDQKHPLREKTKRAASDENKSCSTSVAGLKHKRRAVLKDVTNVLCENSHLNCNIATKQHTSKQARKCPRNKNAEVAAHISMEISPAQEDVKEMLAEELSKIRMGEAQDFTSPAKLEGKKQSDCHGTREGGVADPRLLVPLSTKTSGVERPLKKEESEISEKLDASVGVSVVDIDSNIKDLQLCSLYAPDIFNNIRAKELDQRPSIDYMEKLQHDISPSMRGILIDWLVEMLNGYEIDNLYALFQVSEEYTLVPDTLYLTVNLIDRFLSQNYIEKQRLQLLGVTCMLIASKYEEICAPRVEEFCFITDNTYTRGEASNTILWQVLKMESQVLNFLHFHLSVPTTKSFLRRFIQAAQASCKVPCVELEFLANYLAELTLVEYNFLKLLPSLIAASVVFLARWTLNQSDHPWNSTLEHYTSYTTSELKTTVLALEDLQLNTDGCCLNAIRDKYRQQKVKNSYYLERLYASFWASHFPFMSFSQMVVVVAVQIRSNFDLRTTSFIAFLRTKENGSCINKQTAPSEGDIDSNHRI

SEQ ID NO: 844 - DNA, 1554 bp, Populus balsamifera subsp. trichocarpa
  misc_feature: Ceres ANNOT ID no.1508676
  misc_feature: Encodes the peptide sequence at SEQ ID NO. 845
atgaacaaagaaaatgcaactactgccaaacttgaagagcccgctactcgaattacacgggcacgtgctaaagccttgggggcttcggtaggaatatatcctgcctcaaaaccctccttcaagcaggagcagaggcatcctcttagagcaaagaccaaaagagcagcatcagatgagaataaatctgcttcgacctcgattgctggctttaagcataagagaagggcggtgcttaaagatgtgagcaacatcttttgtgagaattctcatcaaaactgcatccatgcaactaaacaatatactagtaaactagctagaaaatgtcctccgaaaacaaatgcagaggtggctgctcgtatctctatgaaaatttcaccggttcaggaggatgtaaaagaaaagttagctgaagagctgtcaaaaataagaatgggagaagcacaaaattttacttcaccagcaaagttagaggtaaaacaagatagtttgtgtcatggcacaggagaaggtggtgtagcagatccgatgcttctaataccagtttccacaaaattttctggagttgaaagccctctaaagaaagaagtaaacgagatttcaaaaaaactggatgcctcaagtggtgcgagcgtagtggatattgatttaaacataaaagaccctcagttctgcagcttgtatgcccctcatatatataacaatatacgtgtgaaggagcgcgatatcagtccaggaatgcgaggaattctgattgactggcttgtggaggtttctgaagaatatacgttggttccagatactctttacctcactgtcaatctcattgatcgattcctctcacagaactatattgaaaaacaaagactccaactgcttggtgttacttgcatgttaattgcctctaagtatgaagaaattattccgccaagagtggaagggttttgcttcatcactgacaatacttacacaagaggagaggttctgaaaatggagagtcaggtcctgaatttcttgtactttcagttatcagttcctaccacgaaaacattcctgaggagattcattcaagcagcacaagcttcttgcaaggttccttgtgtcgaactggtgttcttggcaaattatttggcagagttgactcttgttgagtacaacttcctaaagttcttaccttccctcatagctgcatccgctgtttttcttgcccgatggacactcaatcagtcagatcatccatggaactcaactcttgagcactacactagatacacagcatcagaactgaaaactacagtactttctctggaagatttgcagctgaacaccaatggttgttgcctaaatgctatacgcgacaaatatagacaacagaagttcgtgtcattctcacaattggttatcattgtgacagttcaaatctgtagcaacattgacctcagtgcgacgagtttcatcgcttttctgaagacgaagaaaaactggtcctgcattaacaagcacagcactctgattcgacactttgagggtgatatcgattctaatcatagagtttaa

SEQ ID NO: 845 - protein, 517 aa, Populus balsamifera subsp. trichocarpa
  misc_feature: Ceres ANNOT ID no.1508676
  misc_feature: Bit score of 1219.9 for HMM based on sequences of FIGURE 9.
  misc_feature (240)..(343): Pfam Name: Cyclin_N Pfam Description: Cyclin, N-terminal domain
  misc_feature (345)..(472): Pfam Name: Cyclin_C Pfam Description: Cyclin, C-terminal domain
  misc_feature: Functional Homolog Of Ceres SEEDLINE ID no. ME08564 at SEQ ID NO. 764
MNKENATTAKLEEPATRITRARAKALGASVGIYPASKPSFKQEQRHPLRAKTKRAASDENKSASTSIAGFKHKRRAVLKDVSNIFCENSHQNCIHATKQYTSKLARKCPPKTNAEVAARISMKISPVQEDVKEKLAEELSKIRMGEAQNFTSPAKLEVKQDSLCHGTGEGGVADPMLLIPVSTKFSGVESPLKKEVNEISKKLDASSGASVVDIDLNIKDPQFCSLYAPHIYNNIRVKERDISPGMRGILIDWLVEVSEEYTLVPDTLYLTVNLIDRFLSQNYIEKQRLQLLGVTCMLIASKYEEIIPPRVEGFCFITDNTYTRGEVLKMESQVLNFLYFQLSVPTTKTFLRRFIQAAQASCKVPCVELVFLANYLAELTLVEYNFLKFLPSLIAASAVFLARWTLNQSDHPWNSTLEHYTRYTASELKTTVLSLEDLQLNTNGCCLNAIRDKYRQQKFVSFSQLVIIVTVQICSNIDLSATSFIAFLKTKKNWSCINKHSTLIRHFEGDIDSNHRV

SEQ ID NO: 846 - protein, 475 aa, Solanum lycopersicum
  misc_feature: Public GI ID no.5420276
  misc_feature: Bit score of 1028.2 for HMM based on sequences of FIGURE 9.
  misc_feature (216)..(343): Pfam Name: Cyclin_N Pfam Description: Cyclin, N-terminal domain
  misc_feature (345)..(472): Pfam Name: Cyclin_C Pfam Description: Cyclin, C-terminal domain
  misc_feature: Functional Homolog Of Ceres SEEDLINE ID no. ME08564 at SEQ ID NO. 764
MRITRARAKTLGSSGGLPPLHPSVRQDKKQGLVTQGTKSKRPAPDENKPANSSSTASQQPKRRAVLRDVTNVLCENPYMNCINGSKFQVKKFSDKRNSKVTPALLVKKPELEDRKESVIEEAKMVKVEESQEHCSQAHFKDHPFTQPSEYITAAQSGLVDLMPVNRSSCNDITLQTTTPKDESKVCLKQEGSNSLSIADIDSKHKDPLMCSLYAPDIYNNLQAMELDRRPSFNYMEKLQRDINKGMRSILIDWLVEVSEEYRLVPDTLYLTVHLIDRFLSEHYIEKQKLQLLGVTCMLIASKYEEICAPRVEEFCFITDNTYSKEEVVRMESLVLNFLGFQLAAPTTKKFLRRFVQASQASYEVPSVELEFMANYLAELTLAEYSFLKFLPSVTAASAVFLARWTLDQSNHPWNSTLEHYTTYKASDLKTTVLLLQDLQMNTSGSTLNAIREKYKQPKFKSVATLSSPKPVQSLF

SEQ ID NO: 847 - protein, 436 aa, Arabidopsis thaliana
  misc_feature: Public GI ID no.22326727
  misc_feature: Bit score of 1078.2 for HMM based on sequences of FIGURE 9.
  misc_feature (175)..(302): Pfam Name: Cyclin_N Pfam Description: Cyclin, N-terminal domain
  misc_feature (304)..(431): Pfam Name: Cyclin_C Pfam Description: Cyclin, C-terminal domain
  misc_feature: Functional Homolog Of Ceres SEEDLINE ID no. ME08564 at SEQ ID NO. 764
MYCSSSMHPNANKENISTSDVQESFVRITRSRAKKAMGRGVSIPPTKPSFKQQKRRAVLKDVSNTSADIIYSELRKGGNIKANRKCLKEPKKAAKEGANSAMDILVDMHTEKSKLAEDLSKIRMAEAQDVSLSNFKDEEITEQQEDGSGVMELLQVVDIDSNVEDPQCCSLYAADIYDNIHVAELQQRPLANYMELVQRDIDPDMRKILIDWLVEVSDDYKLVPDTLYLTVNLIDRFLSNSYIERQRLQLLGVSCMLIASKYEELSAPGVEEFCFITANTYTRPEVLSMEIQILNFVHFRLSVPTTKTFLRRFIKAAQASYKVPFIELEYLANYLAELTLVEYSFLRFLPSLIAASAVFLARWTLDQTDHPWNPTLQHYTRYEVAELKNTVLAMEDLQLNTSGCTLAATREKYNQPKFKSVAKLTSPKRVTSLFSR

SEQ ID NO: 848 - protein, 436 aa, Arabidopsis thaliana
  misc_feature: Public GI ID no.784946
  misc_feature: Bit score of 1068.4 for HMM based on sequences of FIGURE 9.
  misc_feature (175)..(302): Pfam Name: Cyclin_N Pfam Description: Cyclin, N-terminal domain
  misc_feature (304)..(431): Pfam Name: Cyclin_C Pfam Description: Cyclin, C-terminal domain
  misc_feature: Functional Homolog Of Ceres SEEDLINE ID no. ME08564 at SEQ ID NO. 764
MYCSSSMHPNANKENISTSDVQESFVRITRSRAKKAMGRGVSIPPTKPSFKQQKRRAVLKDVSNTSADIIYSELRKGGNIKANRKCLKEPKKAAKEGANSAMDILVDMHTEKSKLAEDLSKIRMAEAQDVSLSNFKDEEITEQQEDGSGVMELLQVVDIDSNVEDPQCCSLYAADIYDNIHVAELQQRPLANYMELVQRDIDPDMRKILIDWLVEVSDDYKLVPDTLYLTVNLIDRFLSNSYIERQRLQLLGVSCMLIASKYEELSAPGVEEFCFITANTYTRREVLSMEIQILNFVHFRLSVPTTKTFLRRFIKAAQASYKVPFIELEYLANYLAELTLVEYSFLRFLPSLIAASAVFLARWTLDQTDHPWNPTLQHYTRYEVAELKNTVLAMEDLQLNTSGCTLAATREKYNQPKFKSVAKLTSPKRVTLLFSR

SEQ ID NO: 849 - protein, 443 aa, Arabidopsis thaliana
  misc_feature: Public GI ID no.509425
  misc_feature: Bit score of 856.7 for HMM based on sequences of FIGURE 9.
  misc_feature (182)..(309): Pfam Name: Cyclin_N Pfam Description: Cyclin, N-terminal domain
  misc_feature (311)..(438): Pfam Name: Cyclin_C Pfam Description: Cyclin, C-terminal domain
  misc_feature: Functional Homolog Of Ceres SEEDLINE ID no. ME08564 at SEQ ID NO. 764
MHRASSKHTNAKKEAISTSKIRDNNVRVTRSRAKALGVSNSPSKPAFKHETKRVARPSNKRMASDNITVCNQKRRAVLKDVTNTLAESIISTEGNVRQACKRGGKETKQIEEDGLVDVDGEKSKLAEDLSKIRMVESLDASASKELVDCAEEDRSDVTDCVQIVDIDSGVQDPQFCSLYAASIYDSINVAELEQRPSTSYMVQLQRDIDPTMRGILIDWLVEVSEEYKLVSDTLYLTVNLIDRFMSHNYIEKRKLQLLGVTCMLIASKYEEISAPRLEEFCFITDNTYTRLEVLSMEIKVLNSLHFRLSVPTTKTFLRRFIRAAQASDKVPLIEMEYLANYFAELTLTEYTFLRFLPSLIAASAVFLARWTLDQSNHPWNKTLQHYTRYETSALKNAVLAMEDLQLNTSGSTLIAIRTKYNQQKFKRVATLTSPERVNTLFSR

SEQ ID NO: 850 - protein, 490 aa, Oryza sativa subsp. japonica
  misc_feature: Public GI ID no.115488682
  misc_feature: Bit score of 1241.8 for HMM based on sequences of FIGURE 9.
  misc_feature (230)..(357): Pfam Name: Cyclin_N Pfam Description: Cyclin, N-terminal domain
  misc_feature (359)..(486): Pfam Name: Cyclin_C Pfam Description: Cyclin, C-terminal domain
  misc_feature: Functional Homolog Of Ceres SEEDLINE ID no. ME08564 at SEQ ID NO. 764
MAGRKENPVLTACQAPSGRITRAQAAANRGRFGFAPSVSLPARTERKQTAKGKTKRGALDEITSASTATSAPQPKRRTVLKDVTNIGCANSSKNCTTTSKLQQKSKPTQRVKQIPSKKQCAKKVPKLPPPAVAGTSFVIDSKSSEETQKVELLAKAEEPTNLFENEGLLSLQNIERNRDSNCHEAFFEARNAMDKHELADSKPGDSSGLGFIDIDNDNGNPQMCASYASEIYTNLMASELIRRPRSNYMEALQRDITKGMRGILIDWLVEVSEEYKLVPDTLYLTINLIDRFLSQHYIERQKLQLLGITSMLIASKYEEICAPRVEEFCFITDNTYTKAEVLKMEGLVLNDMGFHLSVPTTKTFLRRFLRAAQASRNVPSITLGYLANYLAELTLIDYSFLKFLPSVVAASAVFLARWTLDQSDIPWNHTLEHYTSYKSSDIQICVCALRELQHNTSNCPLNAIREKYRQQKFECVANLTSPELGQSLFS

SEQ ID NO: 851 - protein, 437 aa, Arabidopsis thaliana
  misc_feature: Public GI ID no.22327058
  misc_feature: Bit score of 851.2 for HMM based on sequences of FIGURE 9.
  misc_feature (176)..(303): Pfam Name: Cyclin_N Pfam Description: Cyclin, N-terminal domain
  misc_feature (305)..(432): Pfam Name: Cyclin_C Pfam Description: Cyclin, C-terminal domain
  misc_feature: Functional Homolog Of Ceres SEEDLINE ID no. ME08564 at SEQ ID NO. 764
MHRASSKHTNAKKEAISTSKIRDNNVRVTRSRAKALGVSNSPSKPAFKHETKRVARPSNKRMASDNITVCNQKRRAVLKDVTNTLAESIISTEGNVKACKRGGKETKQIEEDGLVDVDGEKSKLAEDLSKIRMVESLDASASKQKEDRSDVTDCVQIVDIDSGVQDPQFCSLYAASIYDSINVAELEQRPSTSYMVQVQRDIDPTMRGILIDWLVEVSEEYKLVSDTLYLTVNLIDRFMSHNYIEKQKLQLLGITCMLIASKYEEISAPRLEEFCFITDNTYTRLEVLSMEIKVLNSLHFRLSVPTTKTFLRRFIRAAQASDKVPLIEMEYLANYFAELTLTEYTFLRFLPSLIAASAVFLARWTLDQSNHPWNQTLQHYTRYETSALKNTVLAMEELQLNTSGSTLIAIHTKYNQQKFKRVATLTSPERVNTLFSR

SEQ ID NO: 852 - protein, 434 aa, Arabidopsis thaliana
  misc_feature: Public GI ID no.8953392
  misc_feature: Bit score of 998.1 for HMM based on sequences of FIGURE 9.
  misc_feature (175)..(302): Pfam Name: Cyclin_N Pfam Description: Cyclin, N-terminal domain
  misc_feature (304)..(429): Pfam Name: Cyclin_C Pfam Description: Cyclin, C-terminal domain
  misc_feature: Functional Homolog Of Ceres SEEDLINE ID no. ME08564 at SEQ ID NO. 764
MYCSSSMHPNANKENISTSDVQESFVRITRSRAKKAMGRGVSIPPTKPSFKQQKRRAVLKDVSNTSADIIYSELRKGGNIKANRKCLKEPKKAAKEGANSAMDILVDMHTEKSKLAEDLSKIRMAEAQDVSLSNFKDEEITEQQEDGSGVMELLQVVDIDSNVEDPQCCSLYAADIYDNIHVAELQQRPLANYMELVQRDIDPDMRKILIDWLVEVSDDYKLVPDTLYLTVNLIDRFLSNSYIERQRLQLLGVSCMLIASKYEELSAPGVEEFCFITANTYTRPEVLSMEIQILNFVHFRLSVPTTKTFLSALFLIIILQVPFIELEYLANYLAELTLVEYSFLRFLPSLIAASAVFLARWTLDQTDHPWNPTLQHYTRYEVAELKNTVLAMEDLQLNTSGCTLAATREKYNQPKFKSVAKLTSPKRVTSLFSR

SEQ ID NO: 853 - DNA, 1898 bp, Glycine max
  misc_feature: Ceres CLONE ID no.527699
  misc_feature: Encodes the peptide sequence at SEQ ID NO. 854
ggctcccaagaaaagaaaggctttcttacaaccctctctttctctctctctgtctgtgagctcctatctctcttcaatggaggtagtggagcttgcaagatagacccagaattcacacggcgcgattgtattttttcgtgctgttcagaataattgcagagatgaagaaagaaaacagtgttatgctgaaagctggggagctccctggtcgattgactcgtgctcgagctgctgctgctcttcgtgcatatggacagctaccccctttgaaagagagagcacagcaaaatcagaatcagttatccagagtcaattcaaaaagagcagtttctgataatacatgtgttcagcgtaaaaggaaggctgttcttcaggaagttactaatgtttgctgtgaaaatgcctacaaggcttgtctcaactcaactaatattcaggctaggaaaagcaagctggctaaggctggtcaaattaatgtgtccaaagtggctccttctgttactgtggagccacgacaatttcaagttgactccaaagcaaaggaaacagcattgcaatcagaagatactatgtgctcaattaatttggaaaacaatgaacttctacaactgaatgccaatgattgtagcaaggactttagattgcctgaaagtcagatgtctggaatatctgctcaccctttgatttctcagaagaaagacacgaaagataaccttccaaaacttttgactgcattgaaggattcagacatcactaatatagatgatgatgatcttgaagatcctcagtcgtgcagcctctatgctgctgatatctacgacaccattcgcgttgctgagcttgcgagaaggccttatccgaactttatggagacagtgcagcgagatattactcaaagcatgcgtggaatactggttgattggcttgtagaggtttctgaggaatacaaattggttacagacactctttacctcactgtgtatctcatagattggtttctgtccaaaaattacattgaaagacaaagacttcagctacttggcatcacctgcatgctaattgcctcgaagtacgaagaaatcaatgccccacgtattgaagatttctgcttcatcacagacaatacatacacgaaagctgaggtactaaaaatggagagtcaagtgttgaagtcgtctgaatatcaactgtatactcccactatacaaactttcctcaggaggtttcttcgggcagcacaagcttcatacaaggaccaaagccttgaattggagtgcctggccaattacctagctgaactaacactgatggactatggtttcttgaatttccttccctctattattgctgcatcagctgtatttcttgcaaggtggacactagatcagtcaaaccacccatggaatccaactcttcaacactatgcctgttacaaagcatcggatttgaaaaccacagttcttgcactacaagacctacagctgaatactgatggctgttctctaactgccgtccgcacgaaatacagacaagacaattttaaatgtgtagcggccttgtcttcaccaaaactgcttgaaactttgttctgaagacaaagatgattagcaaggcaatgcaagggactcctaactgataacaaagaaatcctcattcctaatctaatcttcccttcaacttccattcattaatccatgagatatcttctgtatgtacattacattctaagctgtctaatatgtacacaacaaatatattctgtttcagtatgtacattacatgctaagctgtctcagatagaactagaaccccaagatgacttgggtgttttgaacgtacatgtagtaatgattattgttgggttaacaaaatggcatatgttgaattgccttggactt

SEQ ID NO: 854 - protein, 476 aa, Glycine max
  misc_feature: Ceres CLONE ID no.527699
  misc_feature: Bit score of 937.5 for HMM based on sequences of FIGURE 9.
  misc_feature (217)..(344): Pfam Name: Cyclin_N Pfam Description: Cyclin, N-terminal domain
  misc_feature (346)..(473): Pfam Name: Cyclin_C Pfam Description: Cyclin, C-terminal domain
  misc_feature: Functional Homolog Of Ceres SEEDLINE ID no. ME08564 at SEQ ID NO. 764
MKKENSVMLKAGELPGRLTRARAAAALRAYGQLPPLKERAQQNQNQLSRVNSKRAVSDNTCVQRKRKAVLQEVTNVCCENAYKACLNSTNIQARKSKLAKAGQINVSKVAPSVTVEPRQFQVDSKAKETALQSEDTMCSINLENNELLQLNANDCSKDFRLPESQMSGISAHPLISQKKDTKDNLPKLLTALKDSDITNIDDDDLEDPQSCSLYAADIYDTIRVAELARRPYPNFMETVQRDITQSMRGILVDWLVEVSEEYKLVTDTLYLTVYLIDWFLSKNYIERQRLQLLGITCMLIASKYEEINAPRIEDFCFITDNTYTKAEVLKMESQVLKSSEYQLYTPTIQTFLRRFLRAAQASYKDQSLELECLANYLAELTLMDYGFLNFLPSIIAASAVFLARWTLDQSNHPWNPTLQHYACYKASDLKTTVLALQDLQLNTDGCSLTAVRTKYRQDNFKCVAALSSPKLLETLF

SEQ ID NO: 855 - protein, 461 aa, Arabidopsis thaliana
  misc_feature: Public GI ID no.15220120
  misc_feature: Bit score of 889.0 for HMM based on sequences of FIGURE 9.
  misc_feature (200)..(327): Pfam Name: Cyclin_N Pfam Description: Cyclin, N-terminal domain
  misc_feature (329)..(455): Pfam Name: Cyclin_C Pfam Description: Cyclin, C-terminal domain
  misc_feature: Functional Homolog Of Ceres SEEDLINE ID no. ME08564 at SEQ ID NO. 764
MGKENAVSGNSIPIHGRPVTRALASALRASSKLITSSEVAATTQNQGRVLRAKSKRTALDEKKANAPKKRAVLKDITNVTCENSYTSCFSVAVENIKQIKKGRQSSSSSKVASSSATSQVTDAKVEVVSNSAGASLSVFTDTSLGTNETSYSIIAKPSSRSPPRPFGTVERSCGGASSPKFVDIDSDDKDPLLCSLYAPDIYYNLRVAELKRRPFPDFMEKTQRDVTETMRGILVDWLVEVSEEYTLVPDTLYLTVYLIDWFLHGNYVERQRLQLLGITCMLIASKYEEIHAPRIEEFCFITDNTYTRDQVLEMESQVLKHFSFQIYTPTSKTFLRRFLRAAQVSFPNQSLEMEFLANYLTELTLMDYPFLKFLPSIIAASAVFLAKWTLNQSSHPWNPTLEHYTTYKASDLKASVHALQDLQLNTKGCSLNSIRMKYRQDKFKSVAVFSSGELPDKLFIS

SEQ ID NO: 856 - protein, 434 aa, Brassica napus
  misc_feature: Public GI ID no.562188
  misc_feature: Bit score of 1052.7 for HMM based on sequences of FIGURE 9.
  misc_feature (175)..(302): Pfam Name: Cyclin_N Pfam Description: Cyclin, N-terminal domain
  misc_feature (304)..(431): Pfam Name: Cyclin_C Pfam Description: Cyclin, C-terminal domain
  misc_feature: Functional Homolog Of Ceres SEEDLINE ID no. ME08564 at SEQ ID NO. 764
MGKENVVSRPLTRAFASALRASTTENQQRANTKRPASEDVNVTAPPNKKKKRAVLGDISNASFSAAKLEARDIKQVKKSQGLASASCVTSEVTDLQSGTEAKAEVVSVTAGNTNDTADNCIEKHKLPPRPLGRSSASIVEKSGVIRSSTALDLPKFTDIDSDDKDPLLCCLYAPEIYYNLRVSELKRRPVPNFMERIQKDVTQSMRGILVDWLVEVSEEYTLVPDTLYQTVYLIDWFLHGNYLERQRLQLLGITCMLIASKYEEINAPRIEEFCFITDNTYTRDQVLEMENQVLAHFSFQIYTPTPKTFLRRFLRAAQASYLIPRRELECLASYLTEVTLIDYHFLKFLPSVIAASAVFLAKWTLDQSNHPWNPTLEHYTTYKASDLKASVHALQDLQLNTKGCPLSAIRMKYKQEKFKSVAVLMSPKLLDTLF

SEQ ID NO: 857 - protein, 452 aa, Medicago sativa subsp. falcata
  misc_feature: Public GI ID no.1245816
  misc_feature: Bit score of 1086.2 for HMM based on sequences of FIGURE 9.
  misc_feature (192)..(319): Pfam Name: Cyclin_N Pfam Description: Cyclin, N-terminal domain
  misc_feature (321)..(449): Pfam Name: Cyclin_C Pfam Description: Cyclin, C-terminal domain
  misc_feature: Functional Homolog Of Ceres SEEDLINE ID no. ME08564 at SEQ ID NO. 764
MKEVAPGTQDQKQPLRANSKRALSDVTYLPHKKRAILQDVTNNCGENTKRSCLNPTEIQAKKRKVAKPAQPNVSNEVPSAAELPPFIADSKPVSSMEMRLRSSEDFRCLDDLEDNAPFRMSSNQCGTNNNLLQSQTSRISARPSSSQKKASQIVAAKKANISELLDVSKHPDVADIDADFEDPQLCSHYAADIYDHLRVAELSRRPYPNFMETVQQDITPSMRAILVDWLVEVSEGYKLQANTLYLAVYLIDWFLSKNCIEKERLQLLGITCMLIASKYEEINAPRIEDFCFITDNTYTKEEVVKLESLVLKSSSYQLFAPTTKTFLRRFLRAAQASYKRPSIELEYLTNYLAELTLLNYGFLNFLPSMIAASAVFLARWTLDQSSHPWNPTLEHYASYKASDLKATVLALQDLQLNSNDDCPLTAIRKKYTQDKLNCVAALSSPKLLETLF

SEQ ID NO: 858 - protein, 484 aa, Medicago sativa subsp. x varia
  misc_feature: Public GI ID no.5305100
  misc_feature: Bit score of 1072.2 for HMM based on sequences of FIGURE 9.
  misc_feature (224)..(351): Pfam Name: Cyclin_N Pfam Description: Cyclin, N-terminal domain
  misc_feature (353)..(481): Pfam Name: Cyclin_C Pfam Description: Cyclin, C-terminal domain
  misc_feature: Functional Homolog Of Ceres SEEDLINE ID no. ME08564 at SEQ ID NO. 764
MRKSVTLKAGEVPSRLTRARAVALSTSGQLPPMKEVAPGTQNQKQPLRANSKRAVSDVTYLPHEMRAILQDVTNNCGENTNRSCLNPTEIQAKKRKVAKPAQPDVSNEVPSAAERPPFIADSKPVSSMEMRLRSSEDFRCLDDLEDNAPFRMSSNQSGTNNNLLQNQTSRISARLLSSQKKASQIVAAKKGNISELLDVSKHPDVADIDADFEDPQLCSHYAADIYDHLRVAELSRRPYPNFMETVQQDITPSMRAILVDWLVEVSEGYKLQANTLFLTVYLIDWFLSKNCIERERLQLLGITCMLIATKYEEINAPRIEDFCFITDNTYVKEEVVKLESLVLKSSSYQLFAPTTKTFLRRFLRAAQASYKRPSIELEYLANYLAELTLMNYGFLNFLPSMVAASSVFLARWTLDQSSHPWNPTLEQYASYKASDLKATVLALQDLQLNSNDDCPLTAIRKKYTQDKLNCVAALSSPKLLETLF

SEQ ID NO: 859 - DNA, 1874 bp, Zea mays
  misc_feature: Ceres CLONE ID no.375085
  misc_feature: Encodes the peptide sequence at SEQ ID NO. 860
ctctaaaaccccaaccgtcgacgttcactcctcaccccctgcggccctgctcttttgagcctcactcctcagtcttcacgccgccggggcagtgctaagatccaggacacgcgctgtcccgctagcaccacgcctccccttgtcatcgtcctcctcccacgtgctgctgtgggggtgcagacgggagacacatccggacctgattgatttcttcgttttgttctgctggtttacatggctgcaagaaagaaaaagcctttgcttattgcttgccaagcaaccagtgccagaataacaagatctcaggctgctgcaaatagtacaagatctgggctggctccttctgtaccagtacctctgaaaacggagcataaccatgcagcgaaaaaaaagatgaaaagggaagcttcagatgaaaatgcttctgctgatgctggagcttcagctcctctgcctaaaaggcgtacagttctcaagaatgtaactaacataagctgtgctaaaatttccaaaaggtgcactgctgtgactgggctgaagttgggtccctcccagaaggctgggcagagcataaacaagcaatgcacaaacaagatctccatgcttctccctctggctgttggagggagttcacttgtggatgattctaataatgctgaagaaacacaaatggtagaccttttggcacagaaagagaagcagattgttttgcttaaggaggctcagccattacagaatactgaacaaaacaaaggcggtgcttgtgatgaggcatctgttgaggaaagaaatgccatgaatgtacacgaaactgctgccttaaaggctggggtctctaatggtttaaacattgtagatattgacaaaaataatggtgatcctcaaatgtgtgttacctacgttgcagagatatacagaaatctaatggcctcagagcttataagaagacctaggtcaaattacatggagactttgcaacaggacatcacagctagcatgcgaggtgttctaattgattggcttgttgaggtttcggacgaatataagcttgtggcagatacactttaccttacagtatatcttattgaccaatttctttctcagaactgtatccaaacgcacaagctgcaacttcttgggataactagtatgctgattgcctcgaaatatgaagagtattctgctcctagtgctgaagaattttgtaacataacggctggtacatatgcaaaggctgaggttctggaaatggagcaacaagtgcttaatgatctgggctttcatttatctgttccaacaacaaacacatttctcaggagattccttagagcagcacaggcttctcgtacagctcatctgaccactttgaattatctggcgagttatcttgccgagttgactttaatcagttacgatttcatgaaatttcttccctcagaggtggcagcatcttcgattttccttgcaaaatggacacttgaccaatctgaccatccttggaaccctactcttgagcactacacgtcttacaaaagcttcgatattagaacttgcgtgcgggctctacaggaactgcagcacaacaccagtaattgccccctcaacgccatccgtgagaagtatgggcagcagaagttcgagtgcgttgccaacctcaggtcaccggagctgctgcggtcgctcttcagttgatgtgctcccctgcactctgctgattcactcgccatttgctgcaacgatcctgacactgtataaaatatttcttcagtttctgttccatttccaaactttcttcagtttgaacatgcattctgtgacttgggtcaccgacaaaagaggcgcgacacactaatatatcaatttgtaactcaact

SEQ ID NO: 860 - protein, 485 aa, Zea mays
  misc_feature: Ceres CLONE ID no.375085
  misc_feature: Bit score of 1177.4 for HMM based on sequences of FIGURE 9.
  misc_feature (225)..(352): Pfam Name: Cyclin_N Pfam Description: Cyclin, N-terminal domain
  misc_feature (354)..(481): Pfam Name: Cyclin_C Pfam Description: Cyclin, C-terminal domain
  misc_feature: Functional Homolog Of Ceres SEEDLINE ID no. ME08564 at SEQ ID NO. 764
MAARKKKPLLIACQATSARITRSQAAANSTRSGLAPSVPVPLKTEHNHAAKKKMKREASDENASADAGASAPLPKRRTVLKNVTNISCAKISKRCTAVTGLKLGPSQKAGQSINKQCTNKISMLLPLAVGGSSLVDDSNNAEETQMVDLLAQKEKQIVLLKEAQPLQNTEQNKGGACDEASVEERNAMNVHETAALKAGVSNGLNIVDIDKNNGDPQMCVTYVAEIYRNLMASELIRRPRSNYMETLQQDITASMRGVLIDWLVEVSDEYKLVADTLYLTVYLIDQFLSQNCIQTHKLQLLGITSMLIASKYEEYSAPSAEEFCNITAGTYAKAEVLEMEQQVLNDLGFHLSVPTTNTFLRRFLRAAQASRTAHLTTLNYLASYLAELTLISYDFMKFLPSEVAASSIFLAKWTLDQSDHPWNPTLEHYTSYKSFDIRTCVRALQELQHNTSNCPLNAIREKYGQQKFECVANLRSPELLRSLFS

SEQ ID NO: 861 - protein, 452 aa, Medicago sativa subsp. x varia
  misc_feature: Public GI ID no.1050559
  misc_feature: Bit score of 1040.8 for HMM based on sequences of FIGURE 9.
  misc_feature (192)..(319): Pfam Name: Cyclin_N Pfam Description: Cyclin, N-terminal domain
  misc_feature (321)..(449): Pfam Name: Cyclin_C Pfam Description: Cyclin, C-terminal domain
  misc_feature: Functional Homolog Of Ceres SEEDLINE ID no. ME08564 at SEQ ID NO. 764
MKEVAPGTQDQKQPLRANSKRALSDVTYLPHKKRAILQDVTNNCGVNTKRSCLNPTEIQAKKRKVAKPAQPHVSNEVPSAAELPPFIADSKPVSSMEMRLRSSEDFRCLDDLEDNAPFRMSSNQCGTNNNLLQSQTSRISARPLSSQKKASQIVAAKKGNISELLDVSKHPDVADIDADFEDPQLCSHYAADIYDHLRVAELSRRPYPNFMETVQQDITPSMRAILVDWLVEVSEGYKLQANTLSLTVYLIDWFLSKNCIERERLQLLGITCMLIATKYEEINAPRIKDFCFIQDNTYTKEEVVKLESLVLKSSSYQLFAPTTKTFLRRFLRAAQASYKRPSIELEYLANYLAELTLMNYGFLNFLPSMVAASSVFLARWTLDQSSHPWNPTLEHYASYKASDLKATVLALQDLQLNSNDDCPLTTIRKKYTQDKLNCVAALSSPKLLETLF

SEQ ID NO: 862 - protein, 532 aa, Adiantum capillus-veneris
  misc_feature: Public GI ID no.1665741
  misc_feature: Bit score of 622.6 for HMM based on sequences of FIGURE 9.
  misc_feature (268)..(395): Pfam Name: Cyclin_N Pfam Description: Cyclin, N-terminal domain
  misc_feature (397)..(524): Pfam Name: Cyclin_C Pfam Description: Cyclin, C-terminal domain
  misc_feature: Functional Homolog Of Ceres SEEDLINE ID no. ME08564 at SEQ ID NO. 764
MSEQGCYTDCWGAIWWIWESGIKAMAGLEGEIQTRRLRGREIPVLPPVTRSAAASAANVGYNENTRKTKVSTKRAAADDTSSRVASNVPVQHAKKRAALANLTNQSNSAITRNSSLPSKSHASAVNGKTRAAAGQVKEVQQVAQQVVEPLQEVGREPNTGRSSLANSSITFDNDENACPERATSSVGMKSRTLDVLQLVGNENKTVASLERKTQHSLYISKDTKPRARQGGLFEDCKDDNEEGGWSSKNYMDIDNHKDPQMCSAYAAEIYHHLRMAELKRRPSLNFMDTVQQDINASMRGILVDWLVEVAEEYKLVPDTLYLTISYIDRFLSGNLVTRQRLQLLGVASMLIASKYEEICAPQVDEFCYITDNTYNREEVLEMERSVLNHLHFELTGPTTKSFLRRFVRAAQAGQKSPTLQLEFLGNYLAELTLLEYGFLHFLPSMIAGAAVLVARVTLNPTWRPWNSTLQHYSGYKASELKECAKAILELQKNTKNCTLPAIREKYRQHKFKCVATLHPPASIPAEYFDDIE

SEQ ID NO: 863 - protein, 450 aa, Arabidopsis thaliana
  misc_feature: Public GI ID no.15218225
  misc_feature: Bit score of 909.7 for HMM based on sequences of FIGURE 9.
  misc_feature (191)..(318): Pfam Name: Cyclin_N Pfam Description: Cyclin, N-terminal domain
  misc_feature (320)..(447): Pfam Name: Cyclin_C Pfam Description: Cyclin, C-terminal domain
  misc_feature: Functional Homolog Of Ceres SEEDLINE ID no. ME08564 at SEQ ID NO. 764
MGKENAVSRPFTRSLASALRASEVTSTTQNQQRVNTKRPALEDTRATGPNKRKKRAVLGEITNVNSNTAILEAKNSKQIKKGRGHGLASTSQLATSVTSEVTDLQSRTDAKVEVASNTAGNLSVSKGTDNTADNCIEIWNSRLPPRPLGRSASTAEKSAVIGSSTVPDIPKFVDIDSDDKDPLLCCLYAPEIHYNLRVSELKRRPLPDFMERIQKDVTQSMRGILVDWLVEVSEEYTLASDTLYLTVYLIDWFLHGNYVQRQQLQLLGITCMLIASKYEEISAPRIEEFCFITDNTYTRDQVLEMENQVLKHFSFQIYTPTPKTFLRRFLRAAQASRLSPSLEVEFLASYLTELTLIDYHFLKFLPSVVAASAVFLAKWTMDQSNHPWNPTLEHYTTYKASDLKASVHALQDLQLNTKGCPLSAIRMKYRQEKYKSVAVLTSPKLLDTLF

SEQ ID NO: 864 - protein, 480 aa, Medicago sativa
  misc_feature: Public GI ID no.15419009
  misc_feature: Bit score of 1050.0 for HMM based on sequences of FIGURE 9.
  misc_feature (224)..(347): Pfam Name: Cyclin_N Pfam Description: Cyclin, N-terminal domain
  misc_feature (349)..(477): Pfam Name: Cyclin_C Pfam Description: Cyclin, C-terminal domain
  misc_feature: Functional Homolog Of Ceres SEEDLINE ID no. ME08564 at SEQ ID NO. 764
MRKSVTLKAGEVPSRLTRARAVALSTSGQLPPMKEVAPGTQNQKQPLRANSKRAVSDVTYLPHEMRAILQDVTNNCGENTNRSCLNPTEIQAKKRKVAKPAQPDVSNEVPSAAERPPFIADSKRVSSMEMRLRSSEDFRCLDDLEDNAPFRMSSNQSGTNNNLLQNQTSRISARLLSSQKKASQIVAAKKGNISELLDVSKHPDVADIDADFEDPQLCSHYAADIYDHLRVAELSRRPYPNFMETVQQDITPSMRAILVDWLVEVSEGYKLQANTLFLTVYLIDWFLSKNCIERERLQLLGITCMLIATKYEEINAPRIEDFCFITDNTYVVKLESLVLKSSSYQLFAPTTKTFLRRFLRAAQASYKRPSIELEYLANYLAELTLMNYGFLNFLPSMVAASSVFLARWTLDQSSHPWNPTLEQYASYKASDLKATVLALQDLQLNSNDDCPLTAIRKKYTQDKLNCVAALSSPKLLETLF

SEQ ID NO: 865 - DNA, 1422 bp, Sorghum bicolor
  misc_feature: Ceres ANNOT ID no.6054472
  misc_feature: Encodes the peptide sequence at SEQ ID NO. 831
atggggaagaagggcaagtggttcggcgccgtcaagaaggtcttcagccctgaatccaaggagaagaaagaggagagactaaggaggaaatcagcagctagcaacccagcaccgctagatctgaccccatctacctccttggaagtcaatgtttcggtgccaccccctccagctccggcacctcctccagttctccaccaggccgaggaggtcagggtccctgaacccgagcaggagcagagcaagcatgtcaccgtggaggagccccctgctgttccagcacagccgtcggtgctgccacctggtgtgccaaccgaagagcttgctgcggtcaagatccagaccgccttccgaggttacctggcaaggagggcactaagagcactgcgaggtcttgttcgattgaagtcattggttgagggtaattcagtcaagcgtcaatctgcaagcactctgcgctgtatgcaaactctatcgcgggtgcagtcacaaatacgttctaggagagcaaagatgtccgaggagaaccaggccctccaacgccagctcctacttaaacaggaattggagaatttcagaatgggtgagaactgggatgacagcactcaatccaaggagcaaatcgaggcaagcctgataagcaggcaagaagcagcgataagaagagaaagagcgcttgcatatgcattttcacatcagtggaagagtacttcaagatctgtcaacccaatgtttgtagacccaaacaacttgcagtggggctggagctggttggagcgctggatggcagcaaaaccttgggagggccgtaatggggctgacaaggagagcaactttgaccgcggatcagttaagagtatgagcttgaaccttggagagggtgaaatcacaaaagctttcaaccgccgggactcaaagccagaaaagccatcaccaccaactccaaaaccaacccgtccagcctggcaatccccttcgacgccatctgctaaagtggcaccaatacctgccaggaggaaatccgccacgccaaagaatgggctttcacaggtggacgatgacgctaggagtgtgctcagcgtgcagtctgagcgaccaaggaggcacagtatagccacctcgactgtgcgggatgatgaaagcctcgcaagctccccatcactccccagctacatggttcccacggaatctgcaagagccaaatctcgtctccagggctcatcaatgaccaatggtgcagagacaccagagaaaggaggctctactggaccagtcaagaagaggttgtccttccaaggtggaactgcagctgcctcaccaatgcggcggcattctggtcctcccaaggtggagagtgcagtgaaggacattgttgcaccaccacagccagaggccttggtagtcaatggtggaagcaagtga

SEQ ID NO: 866 - protein, 543 aa, Oryza sativa subsp. japonica
  misc_feature: Public GI ID no.115474509
  misc_feature: Bit score of 70.3 for HMM based on sequences of FIGURE 16.
  misc_feature (125)..(145): Pfam Name: IQ Pfam Description: IQ calmodulin-binding motif
  misc_feature: Functional Homolog Of Ceres SEEDLINE ID no. ME24091 at SEQ ID NO. 922
MGKKAGTTSSWLTAVKRAFRSPSKDDSPNKAARLRDDTDDDKGKRERRRWLFRKSSSPSPAPPTPPPPQQQQQQSRAAAVTEEQRHAIALAVATAATAEAAVATAQAAAEVVRLTRPSSSFVREHYAAIVVQTAFRGYLARRALRALKGLVKLQALVRGHNVRKQANMTLRCMQALVRVQARVRDQRMRLSQDSISLSAAAASAAPCGSSKSSYSVDTSTFWDSKYTHDFAAADRRSIERSRDGSSFAAGDDWDDRPRTIEEIQAMLQTRKDAALKRERALSYAFSHQIWRNPAPSVEEMDVDGQPRWAERWMASRASFDTSRSTVRASAAAAPGRASTDHRDQVKTLEIDTARPFSYSTPRRHGNASYHASSSPMHRAHHHSPVTPSPSKARPPIQVRSASPRVERGGGGGGSYTPSLHSHRHHASSGGAAAVPNYMAATESAKARVRSQSAPRQRPATPERDRMSFGGGGGGGGAKKRLSFPVPIDPYGAYAQSLRSPSFKSAAGRFSSEQRSNVSSSCAESLGGDVVSPSSTTDLRRWLR

SEQ ID NO: 867 - protein, 452 aa, Arabidopsis thaliana
  misc_feature: Public GI ID no.8072394
  misc_feature: Bit score of 851.7 for HMM based on sequences of FIGURE 9.
  misc_feature (191)..(318): Pfam Name: Cyclin_N Pfam Description: Cyclin, N-terminal domain
  misc_feature (320)..(433): Pfam Name: Cyclin_C Pfam Description: Cyclin, C-terminal domain
  misc_feature: Functional Homolog Of Ceres SEEDLINE ID no. ME08564 at SEQ ID NO. 764
MGKENAVSRPFTRSLASALRASEVTSTTQNQQRVNTKRPALEDTRATGPNKRKKRAVLGEITNVNSNTAILEAKNSKQIKKGRGHGLASTSQLATSVTSEVTDLQSRTDAKVEVASNTAGNLSVSKGTDNTADNCIEIWNSRLPPRPLGRSASTAEKSAVIGSSTVPDIPKFVDIDSDDKDPLLCCLYAPEIHYNLRVSELKRRPLPDFMERIQKDVTQSMRGILVDWLVEVSEEYTLASDTLYLTVYLIDWFLHGNYVQRQQLQLLGITCMLIASKYEEISAPRIEEFCFITDNTYTRDQVLEMENQVLKHFSFQIYTPTPKTFLRRFLRAAQASRLSPSLEVEFLASYLTELTLIDYHFLKFLPSVVAASAVFLAKWTMDQSNHPWNPTLEHYTTYKASDLKASVHALQDLQLNTKGCPLSAIRMKYRQEKTYYGFAVQICGGSHVSKAT

SEQ ID NO: 868 - protein, 304 aa, Oryza sativa subsp. japonica
  misc_feature: Public GI ID no.115461823
  misc_feature: Bit score of 551.0 for HMM based on sequences of FIGURE 16.
  misc_feature (107)..(127): Pfam Name: IQ Pfam Description: IQ calmodulin-binding motif
  misc_feature: Functional Homolog Of Ceres SEEDLINE ID no. ME24091 at SEQ ID NO. 922
MGKKGKWFGAVKKVFSPESKEKKEERLRRKLAASNPNPPDLTPSASLEVNVSVPPPPPPPPVQQIEEVKVPEVEQEQSKHVTVEAVPEAVPVPAQTSSLPPGVSREEQATIKIQTAFRGYLARRALRALRGLVRLKSLVEGNSVKRQAASTLRCMQTLARVQSQIRSRRLKMSEENQALQRQLLLKQELESLRMGEQWDDSTQSKEQIEASLISRQEAAVRRERALAYAFSHQWKSTSRSVNPMFVDPNNPQWGWSWLERWMAAKPWEGRAGTDKESNLDRASAKSASLNLGEGEITKAFNSLR

SEQ ID NO: 869 - protein, 500 aa, Oryza sativa subsp. japonica
  misc_feature: Public GI ID no.115440873
  misc_feature: Bit score of 602.5 for HMM based on sequences of FIGURE 16.
  misc_feature (142)..(162): Pfam Name: IQ Pfam Description: IQ calmodulin-binding motif
  misc_feature: Functional Homolog Of Ceres SEEDLINE ID no. ME24091 at SEQ ID NO. 922
MGKKGNWFSAVKKVFSSSDPDGREAKIEKADKSRSRRKWPFGKSKKSDPWTSTVAVPTSTAPPPQPPPPPPTHPIQPQPEEIKDVKAVETDSEQNKHAYSVALASAVAAEAAAVAAQAAAEVVRLTTATTAVPKSPVSSKDELAAIKIQTAFRGYLARRALRALRGLVRLKSLVDGNAVKRQTAHTLHCTQTMTRVQTQIYSRRVKMEEEKQALQRQLQLKHQRELEKMKIDEDWDHSHQSKEQVETSLMMKQEAALRRERALAYAFSHQWKNSGRTITPTFTDQGNPNWGWSWMERWMTSRPWESRVISDKDPKDHYSTKNPSTSASRTYVPRAISIQRPATPNKSSRPPSRQSPSTPPSRVPSVTGKIRPASPRDSWLYKEDDLRSITSIRSERPRRQSTGGASVRDDASLTSTPALPSYMQSTESARAKSRYRSLLTDRFEVPERVPLVHSSIKKRLSFPVADKPNGEHADKLMERGRRHSDPPKVDPASLKDVPVS

SEQ ID NO: 870 - protein, 490 aa, Solanum lycopersicum
  misc_feature: Public GI ID no.5420274
  misc_feature: Bit score of 468.4 for HMM based on sequences of FIGURE 9.
  misc_feature (225)..(352): Pfam Name: Cyclin_N Pfam Description: Cyclin, N-terminal domain
  misc_feature (354)..(481): Pfam Name: Cyclin_C Pfam Description: Cyclin, C-terminal domain
  misc_feature: Functional Homolog Of Ceres SEEDLINE ID no. ME08564 at SEQ ID NO. 764
MMTTQNRRSSAVAKRQAMAANSSGLEHNQTGKLNAKKRPALSNISNNTTVSARNSVSHSSKLAPCTSKIVNIKKNTSACNSNAVSSGTAVLPASSSVRPSSKPVSIQRSDAVVPKITVIPVPATCSMDISPSHSDGSLVSMDESMSNSDTVRSPEVEYIDDHELAAVDSIEKKACSTLYISEHVKAAAADICKRDVLVDLESGDKIMNIDNNLVDPQLCATMACDIYKHLRASEAKKRPSTDFMAKVQKDINPSMRAILIDWLVEVAEEYRLVPDTLHLTINYIDRYLSGNLMDRQRLQLLGVACMMIASKYEEICAPQVEEFCYITDNTYFKEEVLQMESAVLNYLKFEMTAPTAKCFLRRFVRAAQGLNEVLSLQLEHLASYIAELSLLEYNMLCYAPSLIAASAIFLAKYILLPSVKPWNSTLRHYTLYQPSDLRDCVLALHSLCCNNNNSSLPAVREKYSQHKYKFVAKKYCPPTVPVEFFQNISS

SEQ ID NO: 871 - protein, 508 aa, Oryza sativa subsp. japonica
  misc_feature: Public GI ID no.115435508
  misc_feature: Bit score of 469.8 for HMM based on sequences of FIGURE 9.
  misc_feature (243)..(370): Pfam Name: Cyclin_N Pfam Description: Cyclin, N-terminal domain
  misc_feature (372)..(499): Pfam Name: Cyclin_C Pfam Description: Cyclin, C-terminal domain
  misc_feature: Functional Homolog Of Ceres SEEDLINE ID no. ME08564 at SEQ ID NO. 764
MSSNLAASRRSSSSSSVAAAAAAKRPAVGEGGGGGGGKAAAGAAAAKKRVALSNISNVAAGGGAPGKAGNAKLNLAASAAPVKKGSLASGRNVGTNRASAVKSASAKPAPAISRHESATQKESVLPPKVPSIVPTAALAPVTVPCSSFVSPMHSGDSVSVDETMSTCDSMKSPEFEYIDNGDSSSVLGSLQRRANENLRISEDRDVEETKWKKDAPSPMEIDQICDVDNNYEDPQLCATLASDIYMHLREAETRKRPSTDFMETIQKDVNPSMRAILIDWLVEVAEEYRLVPDTLYLTVNYIDRYLSGNEINRQRLQLLGVACMLIAAKYEEICAPQVEEFCYITDNTYFRDEVLEMEASVLNYLKFEVTAPTAKCFLRRFVRVAQVSDEDPALHLEFLANYVAELSLLEYNLLSYPPSLVAASAIFLAKFILQPTKHPWNSTLAHYTQYKSSELSDCVKALHRLFSVGPGSNLPAIREKYTQHKYKFVAKKPCPPSIPTEFFRDATC

SEQ ID NO: 872 - protein, 460 aa, Arabidopsis thaliana
  misc_feature: Public GI ID no.15219350
  misc_feature: Bit score of 473.3 for HMM based on sequences of FIGURE 9.
  misc_feature (197)..(324): Pfam Name: Cyclin_N Pfam Description: Cyclin, N-terminal domain
  misc_feature (326)..(453): Pfam Name: Cyclin_C Pfam Description: Cyclin, C-terminal domain
  misc_feature: Functional Homolog Of Ceres SEEDLINE ID no. ME08564 at SEQ ID NO. 764
MSNILQNRRSSFSSSTKSSLAKRQAPSSSENSVKLMPAMTKKRAPLSNITNQKIASRLQNSDSVHCSNKSAKLKIAPSVCVNASFSSNLQQSIVPHKVASSPSKSDDGSVSMDETRSSSDSYKSPQVEYIENDDVSAVVSIERKALSNLFITPNSETIDNYCSRDVLSDMKKMDKNQIVNIDSNNGDPQLCATFACDIYKHLRASEAKKRPDVDYMERVQKDVNSSMRGILVDWLIEVSEEYRLVPETLYLTVNYIDRYLSGNVISRQKLQLLGVACMMIAAKYEEICAPQVEEFCYITDNTYLKDEVLDMESDVLNYLKFEMTAPTTKCFLRRFVRAAHGVHEAPLMQLECMANYIAELSLLEYTMLSHSPSLVAASAIFLAKYILDPTRRPWNSTLQHYTQYKAMELRGCVKDLQRLCSTAHGSTLPAVREKYSQHKYKFVAKKFCPSVIPQEFFNNS

SEQ ID NO: 873 - DNA, 1723 bp, Gossypium hirsutum
  misc_feature: Ceres CLONE ID no.1926089
  misc_feature: Encodes the peptide sequence at SEQ ID NO. 874
tctctctttcggataaaagaaagctgagtaaaatgtcggcgcaaaagggtaatcggcgatcatccttttcttcatcgacgacgtcgtctttagccaaacgacatgcatcgtcatcggagaatgtgggaagagtcatagcttctttggctaaaaagagagtccctcttactaacattactaaccaaaagcagagctcaagctcaaaaagctcggctttggcctcctctttggtacaaagttcaaacaaaatccaaaaggcaaggaagacacagtctgttacaaatgtaggtctttcaggacatgttctgcctcctacaaatgaaagacgcagttcagttttgcctcccaaggttgttccatctctgccaacaggaaatgaagtgttgttgcctcctccaccagtacagtttagcatggagttttctcctagtaaatcagatggactgtcatcattttccttggatgagacaatgtccacttgtgattctttcaaaagccctgaagttgaatatatcgacaaccatgatgtttcagctatcagttccattgagcgaaaaacattcagcaatctctgtatttcggaccatgatgtagtagcaacaggaagtatttgcaatcgagatgctgtggcagagaaggaagccgatgatatggtaattgatgttgatgacaatttcatggatccccagctttgtgcaacatttgcttgtgatatttacaagcacctacgggcatccgaggtgaagaaaaggccttcgaccaacttcatggagacgattcagaatgacataaattccagcatgcgtgcaatactaattgattggcttgtagaagtggctgaagagtataggcttgtgcaggatacactatacttgacggtgagctacatagaccggtacctctcggggaatacgatgaacaggcagcggctacagttgcttggtgttgcctgcatgatgattgcttccaaatatgaggagatttgtgcccctcagatggaggaattctgctacataactgataatacatatttcaaggatgaggttctagaaatggaatcatctgttctgaattacttgaagtttgaaatgactgccccaacagctaaatgtttcttaagacggtttgttcgtgctgctcaagggatcaatgaggttccatcaatgcaattagagtgcatggccaactacattgctgaactgtctctccttgagtacagtatgctttgctaccctccatcactcattgctgcatccgcaattttccttgctaaatttatacttcttccatcaaagaaaccttggaattctaccttgcagcattacacactgtataagccctccgatctatttgagtgtgttaaggaccttcatagactatgctgtaacaacaacaattctactttgcctgcaatcagggagaaatacagtcagcataagtataaatgtgttgcaaagaagtattgccctccttcaataccttcagatttcttccacaactgaagaaggcattggacaccatcagcaacagcacaactgttccaattctttgttggataaacttttaatgggggtcgagaccaccaaatataaatttctacgttctaacttaattaaatagtactataaagtagtaggtcgatcccaaaggaattaggatttcaaattttcctgtttttgtaatcaaaattttgaaaaataaataaaaaggaggggttttagtt

SEQ ID NO: 874 - protein, 489 aa, Gossypium hirsutum
  misc_feature: Ceres CLONE ID no.1926089
  misc_feature: Bit score of 484.5 for HMM based on sequences of FIGURE 9.
  misc_feature (227)..(354): Pfam Name: Cyclin_N Pfam Description: Cyclin, N-terminal domain
  misc_feature (356)..(483): Pfam Name: Cyclin_C Pfam Description: Cyclin, C-terminal domain
  misc_feature: Functional Homolog Of Ceres SEEDLINE ID no. ME08564 at SEQ ID NO. 764
MSAQKGNRRSSFSSSTTSSLAKRHASSSENVGRVIASLAKKRVPLTNITNQKQSSSSKSSALASSLVQSSNKIQKARKTQSVTNVGLSGHVLPPTNERRSSVLPPKVVPSLPTGNEVLLPPPPVQFSMEFSPSKSDGLSSFSLDETMSTCDSFKSPEVEYIDNHDVSAISSIERKTFSNLCISDHDVVATGSICNRDAVAEKEADDMVIDVDDNFMDPQLCATFACDIYKHLRASEVKKRPSTNFMETIQNDINSSMRAILIDWLVEVAEEYRLVQDTLYLTVSYIDRYLSGNTMNRQRLQLLGVACMMIASKYEEICAPQMEEFCYITDNTYFKDEVLEMESSVLNYLKFEMTAPTAKCFLRRFVRAAQGINEVPSMQLECMANYIAELSLLEYSMLCYPPSLIAASAIFLAKFILLPSKKPWNSTLQHYTLYKPSDLFECVKDLHRLCCNNNNSTLPAIREKYSQHKYKCVAKKYCPPSIPSDFFHN

SEQ ID NO: 875 - DNA, 1512 bp, Populus balsamifera subsp. trichocarpa
  misc_feature: Ceres ANNOT ID no.1491834
  misc_feature: Encodes the peptide sequence at SEQ ID NO. 876
atgaagaaggaaaacacacttccttctaattttaggcaacttaatggtccagtaacacgagcagctgccttgcgtgcttctgggaagatgccacctttaaaggcatcctcaaaacaagaccagaaaaggattttgcgagcaaatccaaaaagagcagccttagatgagaacaacactagtggacctgctaatgcaggtaatcaacgtaagaggagagcagtgcttcaggatgtcacaaatgtttgctgtgagaattcgtatacgagttgcttcagcgcaactaaaattcaggctaagatagctaaaaagggtcagctcaaagtatcaaaaattgccccttcagttgccttagaacaccgacatcttagagctaattcaaagaaaaaaattatttgtcaagaagtaaaaagagtaccttactctgaaattgtatgctcaagtactcaagaaaaagatgtatcttctcaacccagtggcataaggggggttggcatagatgatcctcagcttcctaatcagtgttcgagagtgccttcacatccccataattctccaaagaaaggtcagattctattcaaactcttcgctttaaacatggcaatcttgatggataccttcatttttaacttggtgataaaaagggaaaacaaaggggtgcatcttggttggagagctcataggaccaagcaggaagcagagttgtataaaaatggaacaagtgaaattcgttatagtagtgaaaagtggtcaaagagctgttacgtgcgggtaatgatatttttctctcaaatggtcatggcagagaaatgtaatgtttcggagaatcagaagatatcacgtgatcaagaatttatagacattgatagcaatcacaaggatcctcaactttgcagcctctacgctgctgatatctatagcaatttacgtgttgctgagcttgtccgaaggtctcttcctaattttatggaaacagtgcaacgagacatcactcaaagtatgagagggattttaattgattggcttgttgagtttgacgttaaatgtattactctgtgtcctgaagcaaatatgaagagatttgttcgccgcgagtggaagaattttgcttcatcactgacaacacatacacgagccatgaggagatttttacgtgcagcacaggcatcatacaagagccctagctatgaactagagtacctggctgattacctagcagaactgacattagttgactacagtttcttgaattttcttccttctgtcattgccgcatcatctgtatttcttgccaggtggactctggatcagacaagccatccatggagtccaaccctagaaaaatatacttcttacaaggcgtcagatcttaaaactacagttcttgcaatgcaagatttacaactgaacaccagtgggtgtcctctgaatgccatacgcatgaagtataggcaaccgaagttcaaatctgtgtctgctttgtcttctccgaaactgcttgaaacactattctga

SEQ ID NO: 876 - protein, 503 aa, Populus balsamifera subsp. trichocarpa
  misc_feature: Ceres ANNOT ID no.1491834
  misc_feature: Bit score of 508.6 for HMM based on sequences of FIGURE 9.
  misc_feature (303)..(343): Pfam Name: Cyclin_N Pfam Description: Cyclin, N-terminal domain
  misc_feature (379)..(500): Pfam Name: Cyclin_C Pfam Description: Cyclin, C-terminal domain
  misc_feature: Functional Homolog Of Ceres SEEDLINE ID no. ME08564 at SEQ ID NO. 764
MKKENTLPSNFRQLNGPVTRAAALRASGKMPPLKASSKQDQKRILRANPKRAALDENNTSGPANAGNQRKRRAVLQDVTNVCCENSYTSCFSATKIQAKIAKKGQLKVSKIAPSVALEHRHLRANSKKKIICQEVKRVPYSEIVCSSTQEKDVSSQPSGIRGVGIDDPQLPNQCSRVPSHPHNSPKKGQILFKLFALNMAILMDTFIFNLVIKRENKGVHLGWRAHRTKQEAELYKNGTSEIRYSSEKWSKSCYVRVMIFFSQMVMAEKCNVSENQKISRDQEFIDIDSNHKDPQLCSLYAADIYSNLRVAELVRRSLPNFMETVQRDITQSMRGILIDWLVEFDVKCITLCPEANMKRFVRREWKNFASSLTTHTRAMRRFLRAAQASYKSPSYELEYLADYLAELTLVDYSFLNFLPSVIAASSVFLARWTLDQTSHPWSPTLEKYTSYKASDLKTTVLAMQDLQLNTSGCPLNAIRMKYRQPKFKSVSALSSPKLLETLF

SEQ ID NO: 877 - DNA, 1395 bp, Sorghum bicolor
  misc_feature: Ceres ANNOT ID no.6020456
  misc_feature: Encodes the peptide sequence at SEQ ID NO. 878
atggctgcacggaaagaaaaccctgagcttattgcttgtcaagcacccaatggtcgaatcacgcgagctcaagccgctgcaaatcgtcgaagctttggtgttctcccttctgttccactgcctgcaaaaactgatcgaaaacagactacacaagggaagatgaaaaggggatcttcatatgacaacactagtgcaagtactgcaatttctggcccccagcctaagaggcgcacagttctcagggatgtgaccaatttgcgtaatgctaactctaacaaaacttttgctgctgcaccgaaggttcagacaaggccctccctaaggactggaagaaccgtgaccagaggcaagcagtgcacaaaaaggattcctaaaataccccaaccagctggtaatggtggttcattcgccaatgattcgagcattgccgaagaaacacaagagaaacttttggcacagaaagaagaacctattcttttgcttgagaacaggggctcactgtcattgcagaatgttgaaaggaacagggacagtgcttgtcatgaggcattctttaaggaaagaaatgtcagggatatatgtgaaccttctgtgtcaaagaatggggactcttctgtgttagacattgtagatatcgacaaagataatggcaatcctcaaatgtgtgcttcctacgttgtagagatatactcaaaccttatggtttcagagcttatgagaagacccagtccgaattacatggagggtttgcaacgggacatcactaagggcatgagaggaatactcattgattggcttgtggaggtttctgaagaatacaagcttgttccagacacgctgtacctaactgtatatgttattgaccgaaagtatgaagagatatgtgctcctcgagttgaagaattctgtttcataaccgacaatacatacacaaaggcagaggtgctgaaaatggagtgccaagtgctgaacgacctgggatttcatctttctgttccaactacaaaaacatttctcaggagattccttagagcggcacaagcatctcgtaaaattccttctatgactttgggatttctggccaattatcttgcggagttgactttgaccgattatgagttcttgaaatttcttccatcattggtggcagcatcggctgtgtttcttgctagatggacacttgaccaatccgacgaaccatggaaccaaactctagagcactacacctcttacaaatgctctgacattcaattatgtgtctgtgctctacgagaactccagcataacaccagtaactgtcctcttaacgccatccgtgagaagtacaaacatcaaaagtttgattgcgtagcaaacctaacctcaccggagctccctcggtcgctcttcagctga

SEQ ID NO: 878 - protein, 464 aa, Sorghum bicolor
  misc_feature: Ceres ANNOT ID no.6020456
  misc_feature: Bit score of 931.3 for HMM based on sequences of FIGURE 9.
  misc_feature (228)..(331): Pfam Name: Cyclin_N Pfam Description: Cyclin, N-terminal domain
  misc_feature (333)..(460): Pfam Name: Cyclin_C Pfam Description: Cyclin, C-terminal domain
  misc_feature: Functional Homolog Of Ceres SEEDLINE ID no. ME08564 at SEQ ID NO. 764
MAARKENPELIACQAPNGRITRAQAAANRRSFGVLPSVPLPAKTDRKQTTQGKMKRGSSYDNTSASTAISGPQPKRRTVLRDVTNLRNANSNKTFAAAPKVQTRPSLRTGRTVTRGKQCTKRIPKIPQPAGNGGSFANDSSIAEETQEKLLAQKEEPILLLENRGSLSLQNVERNRDSACHEAFFKERNVRDICEPSVSKNGDSSVLDIVDIDKDNGNPQMCASYVVEIYSNLMVSELMRRPSPNYMEGLQRDITKGMRGILIDWLVEVSEEYKLVPDTLYLTVYVIDRKYEEICAPRVEEFCFITDNTYTKAEVLKMECQVLNDLGFHLSVPTTKTFLRRFLRAAQASRKIPSMTLGFLANYLAELTLTDYEFLKFLPSLVAASAVFLARWTLDQSDEPWNQTLEHYTSYKCSDIQLCVCALRELQHNTSNCPLNAIREKYKHQKFDCVANLTSPELPRSLFS

SEQ ID NO: 879 - DNA, 1518 bp, Sorghum bicolor
  misc_feature: Ceres ANNOT ID no.6028874
  misc_feature: Encodes the peptide sequence at SEQ ID NO. 880
atgtcgaccatcgccgcctcccgccgctcgtcctcgtcctcgtccgcggccgccaagcgccccgcgatttcggagggcgccgggggacccaaggtggccgccgcgcaggccaagaagcgcgtggcgctcggcaacatcaccaacgttgccgcgcgaggagggagggccgtcgttggcggcggccttgggaatgccgcgccacccaccaccagcgcgaaattgaatccagcggtacccttgaagaagccatctttggcaagtgctcggagtgtgagctccattcggggtcaagctgtcaagtcggcttccatcaagccagctccaccagtgtcacgccatggcagtgcaattcaaaaacataatgttcctcctcctaaagtgcctaccattgccgatgtgccaagtcacgctcctgccttggtaccctgcaccggcttggtgtctcctggacgctcaggagattttgtttcgattgatgatacgatgtcgacttgcgactccatgaagagcccggactttgagtacatagacaatcaggattcctcgatgctggcttcattgcagcgacggacaaatgaacatctgcgaataacagaggatagagatgttgaagaaaataagtggaagaaaaatgccattgccccaatggaaattgaccgcatttgtgatgttgacaacgaatatgaggacccacagttgtgtgctactctggcttctgacatttacatgcacctgcgggaggctgagacgaagaaaagaccatcaactgatttcatggaaacaattcaaaaagacatcaacccaagcatgagggcaattttgatcgactggcttgtggaagtttctgaagaatatcgtcttgttcctgatactttgtacctgacagttaactacattgaccgttatctttctggtaacgaaattaaccgccaacggttgcaattacttggtgttgcttgcatgcttatagctgcaaaatatgaggagatatgtgcaccccaagtagaagaattctgctacataacagacaatacatacttcagagatgaggttctagatatggaaacttctgtactgaaatacttgaagtttgaaatgacagcacctacagcaaagtgctttttgaggaggtttgctcgtgctgcacaagcgtgtgacgaggatcctgctttgcatctcgagttccttgccaattacatcgctgagctatcactactggagtacaatctactctcttaccctccatcactaatagctgcatcggctattttcttggcgaggtttatactacagccaacaaagtatccttggaattccacacttgctcattatacacagtacaagccgtccgagttgagtgactgtgtaaaggcattgcatcgcctgtgcagtgttggttctgggaccaaccttccagcaatcagagaaaagtacagtcaacataagtacaaatttgttgcaaagaagcagtgtccaccacagatacctactgaattctttcgggatgccacatgctag

SEQ ID NO: 880 - protein, 505 aa, Sorghum bicolor
  misc_feature: Ceres ANNOT ID no.6028874
  misc_feature: Bit score of 470.5 for HMM based on sequences of FIGURE 9.
  misc_feature (240)..(367): Pfam Name: Cyclin_N Pfam Description: Cyclin, N-terminal domain
  misc_feature (369)..(496): Pfam Name: Cyclin_C Pfam Description: Cyclin, C-terminal domain
  misc_feature: Functional Homolog Of Ceres SEEDLINE ID no. ME08564 at SEQ ID NO. 764
MSTIAASRRSSSSSSAAAKRPAISEGAGGPKVAAAQAKKRVALGNITNVAARGGRAVVGGGLGNAAPPTTSAKLNPAVPLKKPSLASARSVSSIRGQAVKSASIKPAPPVSRHGSAIQKHNVPPPKVPTIADVPSHAPALVPCTGLVSPGRSGDFVSIDDTMSTCDSMKSPDFEYIDNQDSSMLASLQRRTNEHLRITEDRDVEENKWKKNAIAPMEIDRICDVDNEYEDPQLCATLASDIYMHLREAETKKRPSTDFMETIQKDINPSMRAILIDWLVEVSEEYRLVPDTLYLTVNYIDRYLSGNEINRQRLQLLGVACMLIAAKYEEICAPQVEEFCYITDNTYFRDEVLDMETSVLKYLKFEMTAPTAKCFLRRFARAAQACDEDPALHLEFLANYIAELSLLEYNLLSYPPSLIAASAIFLARFILQPTKYPWNSTLAHYTQYKPSELSDCVKALHRLCSVGSGTNLPAIREKYSQHKYKFVAKKQCPPQIPTEFFRDATC

SEQ ID NO: 881 - DNA, 1509 bp, Sorghum bicolor
  misc_feature: Ceres ANNOT ID no.6099828
  misc_feature: Encodes the peptide sequence at SEQ ID NO. 882
atgtcgacccgcgccgcctcccgccgctcctcctcgtcgtccgcggccgccaagcgccccgcgatggcggagggcgccaaggcggcgggaaccgccgccgcgcaggccaagaagcgcgccgcgctcggcaacatcaccaacgtcgtcgccgctccggcgggaagggccgccgcccttgggaaggtcgcgccaccggtcaccggcgcgaagttgaattcagctacctcagctgtacccttaaagaagccatctttggcaaatgctcgcaatgcgagctccattcggggttctgctgtgaagtcggcttccatcaagccagctccaccagtaccacgcctcgacagcagcacaaggccgaagcataatgttcctgtgcctgccactgtccatgtgccaagtcgtgctcctgccttggtaccctgcagcagtttcgtgtcgcctgcacgttcaggagattcagtttctatcgatgagacgatgtcgacttgcgactccatgaaaagcccggactttgagtacatagacaatggggattcctcgatgctggcctcgttgcagcgacgggcagatgaacatctgcgtatatcagaggatacagatgttgaagaaaataaatggaagaaaaatgcccctgccccaatggaaatcgaccgcgtctgtgatgttgacaacgacttggaggatccacagttgtgcgctactctggcttctgacatctacatgcatctgcgagaagctgagacaaagaaacgaccatcaactgatttcatggaaacgattcaaaaagatgtcaacccaagcatgagggcaattttgatagactggctcgtagaagttgctgaagagtatcgtcttgttcctgatactttgtacctgacagttaactacattgaccgttatctttctggcaacgaaatcaaccgccaaaggctgcaattacttggtgttgcttgcatgcttatagctgcaaaatacgaggagatatgtgcaccccaagtagaagaattctgctacataacggacaatacatacttcagagatgaggtcctagaaatggaagcttctgtgctgaattatttgaagtttgaaatgacagcacctacagcaaagtgttttttgaggagatttgctcgttctgcacaagcgtgtgatgaggatcctgctttgcatctcgagttcctcgccagttacatcgctgagctatcccttctggagtacaatctactatcctaccctccatcactaatagctgcttcggctattttcttggcgaggtttatactccagccaacaaagtatccttggaactccacactttctcattacacacagtacaagccgtccgaattgagcgactgtgtaaaggcattgcaccgccttttcagcgttggtcctgggagcaaccttccagcaatcagagaaaagtacagtcaacataagtacaaatttgttgcgaagaagcagtgtccaccacaaatccctaccgaattcttcagggatacgacatga

SEQ ID NO: 882 - protein, 502 aa, Sorghum bicolor
  misc_feature: Ceres ANNOT ID no.6099828
  misc_feature: Bit score of 457.2 for HMM based on sequences of FIGURE 9.
  misc_feature (238)..(365): Pfam Name: Cyclin_N Pfam Description: Cyclin, N-terminal domain
  misc_feature (367)..(494): Pfam Name: Cyclin_C Pfam Description: Cyclin, C-terminal domain
  misc_feature: Functional Homolog Of Ceres SEEDLINE ID no. ME08564 at SEQ ID NO. 764
MSTRAASRRSSSSSAAAKRPAMAEGAKAAGTAAAQAKKRAALGNITNVVAAPAGRAAALGKVAPPVTGAKLNSATSAVPLKKPSLANARNASSIRGSAVKSASIKPAPPVPRLDSSTRPKHNVPVPATVHVPSRAPALVPCSSFVSPARSGDSVSIDETMSTCDSMKSPDFEYIDNGDSSMLASLQRRADEHLRISEDTDVEENKWKKNAPAPMEIDRVCDVDNDLEDPQLCATLASDIYMHLREAETKKRPSTDFMETIQKDVNPSMRAILIDWLVEVAEEYRLVPDTLYLTVNYIDRYLSGNEINRQRLQLLGVACMLIAAKYEEICAPQVEEFCYITDNTYFRDEVLEMEASVLNYLKFEMTAPTAKCFLRRFARSAQACDEDPALHLEFLASYIAELSLLEYNLLSYPPSLIAASAIFLARFILQPTKYPWNSTLSHYTQYKPSELSDCVKALHRLFSVGPGSNLPAIREKYSQHKYKFVAKKQCPPQIPTEFFRDTT

SEQ ID NO: 883 - DNA, 1518 bp, Sorghum bicolor
  misc_feature: Ceres ANNOT ID no.6099803
  misc_feature: Encodes the peptide sequence at SEQ ID NO. 884
atgtcgaccttcgccgcctcccgccgctcctcctcgtccgcagcctccaagcgccccgcgatggacgagaacgccgccggtggaccgcgatggacgagaccgcaggccacgaagcgcgtcgcgctcggaaacatcaccaacgtcgccgctcccgctccagggaggagggccgccgtggggaaggtcgcgccacccgccaccacccgcgcgaagttgaatccggcaacctcagcagcacccttgaagaaaccatatccagcaaatgcacgcaatgtgagctccattcggggttctgctgtgaagtcggcttccatcaagccaggtccaccagtatcatgcctttgcagcagcacaatgcagcagaagcataatgttcctccacctaaagtgcctaccactgtcaatgtgccaagtcgtgctccagccttggtaccctgcagcagcttcatgtctcctggacgttcaggagattcagtttctatggatgagacgatgtcgatttgtgactccatgaaaagcccggactttgagttcatagacaatggggattcctcggtgctggcttcgttgcagcggcaggcaaatgaacatttgcgcatatcagaggaaaataagtggaagaaaaatgcccctgccccatttgaaatcgaccacatctgtgatgttgacaatgactacgaggatccacagttgtgcgctactctggcttccgacatttacatgcatctgcgagaggctgagatgaagaaaagcaaaagaccatcaactgacttcatggaaactattcacaaaagtgtcaacccaagcatgagggctattttgatcgactggcttgtggaagttgctgaagaatatcgtcttgttcctgatactctctacctgacagttaactacattgaccgttatctttctggcaatgaaatcgaccgccaaaggctgcaattacttggtgttacttgcatgcttatagccgcaaaatacgaggagatatgtgcaccccaagtagaagagttctgctacataactgatagtacatacttcagagatgatgttttagagatggaagcttctgtactgaattacttgaagtttgaaatggcagcacctacaccaaagtgctttctgaggagatttgcccgtgctgcacaagcgtgtgatgaggatcctgctttgcatctcgagttcctcgccaattacatcgctgagctatcactgctggagtacaatctactctcttacccgccatcactaatagctgcctcagctgttttcttggcaagatatgtactgcagccaacaaagtatccttggaattccacacttgctcattacacacagtataagccgtcggaactgagtgactgtgtaaaggcattgcaccgccttttcagcgttggtcctgggagtaaccttccagcaatcagagaaaaatacagtcaacataagtacaaatttgttgcaaggaagcagtgcccaccgtcaatccctacagaattctttcgtgatgtaacatggtaa

SEQ ID NO: 884 - protein, 505 aa, Sorghum bicolor
  misc_feature: Ceres ANNOT ID no.6099803
  misc_feature: Bit score of 446.0 for HMM based on sequences of FIGURE 9.
  misc_feature (238)..(367): Pfam Name: Cyclin_N Pfam Description: Cyclin, N-terminal domain
  misc_feature (369)..(496): Pfam Name: Cyclin_C Pfam Description: Cyclin, C-terminal domain
  misc_feature: Functional Homolog Of Ceres SEEDLINE ID no. ME08564 at SEQ ID NO. 764
MSTFAASRRSSSSAASKRPAMDENAAGGPRWTRPQATKRVALGNITNVAAPAPGRRAAVGKVAPPATTRAKLNPATSAAPLKKPYPANARNVSSIRGSAVKSASIKPGPPVSCLCSSTMQQKHNVPPPKVPTTVNVPSRAPALVPCSSFMSPGRSGDSVSMDETMSICDSMKSPDFEFIDNGDSSVLASLQRQANEHLRISEENKWKKNAPAPFEIDHICDVDNDYEDPQLCATLASDIYMHLREAEMKKSKRPSTDFMETIHKSVNPSMRAILIDWLVEVAEEYRLVPDTLYLTVNYIDRYLSGNEIDRQRLQLLGVTCMLIAAKYEEICAPQVEEFCYITDSTYFRDDVLEMEASVLNYLKFEMAAPTPKCFLRRFARAAQACDEDPALHLEFLANYIAELSLLEYNLLSYPPSLIAASAVFLARYVLQPTKYPWNSTLAHYTQYKPSELSDCVKALHRLFSVGPGSNLPAIREKYSQHKYKFVARKQCPPSIPTEFFRDVTW

SEQ ID NO: 885 - DNA, 1137 bp, Sorghum bicolor
  misc_feature: Ceres ANNOT ID no.6094932
  misc_feature: Encodes the peptide sequence at SEQ ID NO. 886
atggccgacaaggagaactccgccgccgccgctgttgccgccgccccgccgcgcctcacccgcgccgcagccaagcgcgccgccgccgtcacggccgtggccgtcgccgccaagcgcaagcgcgtcgcgcttacccagctgcccacgcaccccaacgccgtgcacgacgactactacgatgacggcgacgacgacgacaagcccgtcaggaagcagcagcacctcctcgtccccgccgccaagcccaagcccaaggcagcgcccgcgcctgccgccgcctctgacgaggaggcggaggatccgcagctctgcaagccctacgcctccgacatctactcctacctccgctccatggagtcgcagcccaagcgccgccccgccgcggactacatcgccgcggtgcaggtcgacgtcacgcctaacatgcgcgccatcctcgtcgactggctcgtcgaggtcgccgaggagtacaagctcgtctccgacacgctctacctcaccgtctcctacgtcgaccgcttcctctccgccaacgccctcaacaggcagaggctgcagctcctcggcgtctgcgccatgctcgtcgcatccaagtatgaggagatcagcccgcccaatgtggaggatttctgctacatcaccgataacacctacaccaagcaggaggtagttaagatggagagtgatatactgaatgtcctcaagtttgaggtgggcaatcctacccccaagacgttcctgaggatgttcatcagatctgcccaagaagacaacaataagtgtcctagcctccagctggagttcctgggtaactacctgtgtgagctgagcttgctggactacagcttgcttcgcttcttgccatcacttgttgcagcctcagtggtgtttgttgcaaggctgacccttgatccacacaccaatccctggagcaagaagatgcagacactaactggctacaagccatctgagttgaaggactgtgttgctgccatacatcatatgcagctcaaccggaaatattcatccatgatggcgatccgggagaaatacaagcaacacaagttcaagggtgtatcagctttgctacctcctgttgagatcccagcatcatacttcaagaaactgaaggagtag

SEQ ID NO: 886 - protein, 378 aa, Sorghum bicolor
  misc_feature: Ceres ANNOT ID no.6094932
  misc_feature: Bit score of 351.0 for HMM based on sequences of FIGURE 9.
  misc_feature (110)..(239): Pfam Name: Cyclin_N Pfam Description: Cyclin, N-terminal domain
  misc_feature (241)..(369): Pfam Name: Cyclin_C Pfam Description: Cyclin, C-terminal domain
  misc_feature: Functional Homolog Of Ceres SEEDLINE ID no. ME08564 at SEQ ID NO. 764
MADKENSAAAAVAAAPPRLTRAAAKRAAAVTAVAVAAKRKRVALTQLPTHPNAVHDDYYDDGDDDDKPVRKQQHLLVPAAKPKPKAAPAPAAASDEEAEDPQLCKPYASDIYSYLRSMESQPKRRPAADYIAAVQVDVTPNMRAILVDWLVEVAEEYKLVSDTLYLTVSYVDRFLSANALNRQRLQLLGVCAMLVASKYEEISPPNVEDFCYITDNTYTKQEVVKMESDILNVLKFEVGNPTPKTFLRMFIRSAQEDNNKCPSLQLEFLGNYLCELSLLDYSLLRFLPSLVAASVVFVARLTLDPHTNPWSKKMQTLTGYKPSELKDCVAAIHHMQLNRKYSSMMAIREKYKQHKFKGVSALLPPVEIPASYFKKLKE

SEQ ID NO: 887 - DNA, 1287 bp, Sorghum bicolor
  misc_feature: Ceres ANNOT ID no.6074428
  misc_feature: Encodes the peptide sequence at SEQ ID NO. 888
atggcggacaaggagaacgcaggtcccgcggcggggcctcggctcacgcgggccgcggcgaagcgcgctgcggcggcggcggtggcggtggcggcggagggtcccggtgacgccaagcggaggcgggtggcgctcggggagctaccggccctcgccaacaacgccgccgctggcctccgcgcgccgtctcgccccgccaagccctcgaagcccgcgtccaggtccgggaggcacgcgaggcccggcgcgtcggaggcccgcgggcccgccgttgccgccgccgccgccgaggccgagctctgcgcgtcctcctccccgccgcgcgccgccgaggccgacgccgagtccaactccgcctcctactccgcgccgcgtgccaccgccgacaccgactcctccttttcctcctcgccgccgcgcgccgccgcggcggcggcggcggcgcccgccgacctccagttctgcgggtcttacgcctccgacatctacacctacctccgctccctggaggtggagccgcagcggcggtccagatccgactacatcgaggcggtccaggcggacgttacggcccacatgcggagcatcctcgttgactggctcgtcgaggtcgccgaggagtataagctcgttgcggacacgctctacctcgccatctcctatgtcgatcgcttcctctctgtcaatgcgcttggccgagacaagctgcagctccttggcgttgcgtccatgctcattgctgcgaagtacgaggagatcagcccgcctcatcctgaggacttctgctacatcacagacaacacctacaccaaagaggagctcctcaagatggagagcgacatactcaagctcctcaagttcgagttgggcaatcctaccatcaagaccttcctgaggcggttcacaagatatgctcatgaagacaagaagcgctccatcttgttaatggaattcttggggagctacctcgctgagttgagtctactagattatggctgtctccggttcttgccgtcggtagttgctgcttcagttatgtttgttgctaggctgaccattgatccaaatgtcaatccttggaacacgaagctgcagaagatgactggctacaaagtttctgacctcaaggattgcattgtagccatacatgacttgcagctcaacaggaaatgtccatcattaatggcaattcgagacaagtacaagcaacacaagttcaaatgtgtgtcaacgcttcttccccctgttgtgatccctgcttcatactttgaagacttagatgagtag

SEQ ID NO: 888 - protein, 428 aa, Sorghum bicolor
  misc_feature: Ceres ANNOT ID no.6074428
  misc_feature: Bit score of 374.9 for HMM based on sequences of FIGURE 9.
  misc_feature (161)..(290): Pfam Name: Cyclin_N Pfam Description: Cyclin, N-terminal domain
  misc_feature (292)..(419): Pfam Name: Cyclin_C Pfam Description: Cyclin, C-terminal domain
  misc_feature: Functional Homolog Of Ceres SEEDLINE ID no. ME08564 at SEQ ID NO. 764
MADKENAGPAAGPRLTRAAAKRAAAAAVAVAAEGPGDAKRRRVALGELPALANNAAAGLRAPSRPAKPSKPASRSGRHARPGASEARGPAVAAAAAEAELCASSSPPRAAEADAESNSASYSAPRATADTDSSFSSSPPRAAAAAAAAPADLQFCGSYASDIYTYLRSLEVEPQRRSRSDYIEAVQADVTAHMRSILVDWLVEVAEEYKLVADTLYLAISYVDRFLSVNALGRDKLQLLGVASMLIAAKYEEISPPHPEDFCYITDNTYTKEELLKMESDILKLLKFELGNPTIKTFLRRFTRYAHEDKKRSILLMEFLGSYLAELSLLDYGCLRFLPSVVAASVMFVARLTIDPNVNPWNTKLQKMTGYKVSDLKDCIVAIHDLQLNRKCPSLMAIRDKYKQHKFKCVSTLLPPVVIPASYFEDLDE

SEQ ID NO: 889 - DNA, 1440 bp, Sorghum bicolor
  misc_feature: Ceres ANNOT ID no.6072122
  misc_feature: Encodes the peptide sequence at SEQ ID NO. 890
atgtcgtgctgggcagcagggcgccgctcctcggcgtcggccatggcagagaacgccggcgcgcggggcgccaaggaggcggtggcgcggtccggcaagcgcgtcgccctcgggaacctcaccaacgtcttccgcggcagctggaagtccggcgcggcgaattcagcgtccgatgcgaaattgagttctaccaaaccagttgatgtcaagaagggatccttcgcttgcctgcacaatgtgaacacggaacggggttctagcagaaggctggcctctgaccaatttgatcaggcagtatcagttcttcagaagaacacatctcttccttctgtgccagacgttgtatcaacaggttgcagctcacctggcctgtctcaagattgttcagtctccatggatgatgctatatcaatatgcaactcaacagaaagctctgatcttcagtgcctcaatgatgatgacccctcaatggtagcttctttgcattggtgggccagtgatagacttcatttctctgatagtatggatgttgcagaactcaactggaggaaacatagtactattcctctgaaagctgataatataattgatcttgactgcaactataaggatccacggctttctacaactcttgcctgtgaaatttacgagagcttgcgagaggctgagactaggaaaatgccttcaacaaactttttggaaaccactcagacagatatgagcaaaaccatgagggcaatgttaatagactggcttgtagaagtcacagaagaatatcgtcttgttcctgaaaccttatacctcactgtcaattacattgaccgctatctttctgtcaaagagatcagtcggcacagactgcaattagttggtgttgcctgcttgcttatagctgcgaagtatgaagaaatatgcccacttcaggttgaagagctctgttatgttactgactattcatacactaaggaagaggttttgcaaatggaagcttctgttctgaatgacttgaagtttgagatgacagtacctacagcaaaatgtttcttaaggagatttgtgcatgctgctcaagttcttgacaagggctcatctctgcatcttgagttcttagccaactacatttgtgagctgtcacttctggactacagcttactttgctatttaccttcattggtagctgcctctgctgttttcttggcaaagtatatccttatgccaataaagaacccatggaattccacactatcttactacacgcgatatacaccatctgagttgcgtggttgtgtaaggttactgcaccggctcttccgtctgggccctggaagcaatcttcctgcaattagagaaaagtacagtcagcataagtacaaatttgtagcaaagaagtactgcccaccgtcaatccctactaagttcttccaggatctgacaagttag

SEQ ID NO: 890 - protein, 479 aa, Sorghum bicolor
  misc_feature: Ceres ANNOT ID no.6072122
  misc_feature: Bit score of 322.6 for HMM based on sequences of FIGURE 9.
  misc_feature (214)..(341): Pfam Name: Cyclin_N Pfam Description: Cyclin, N-terminal domain
  misc_feature (343)..(470): Pfam Name: Cyclin_C Pfam Description: Cyclin, C-terminal domain
  misc_feature: Functional Homolog Of Ceres SEEDLINE ID no. ME08564 at SEQ ID NO. 764
MSCWAAGRRSSASAMAENAGARGAKEAVARSGKRVALGNLTNVFRGSWKSGAANSASDAKLSSTKPVDVKKGSFACLHNVNTERGSSRRLASDQFDQAVSVLQKNTSLPSVPDVVSTGCSSPGLSQDCSVSMDDAISICNSTESSDLQCLNDDDPSMVASLHWWASDRLHFSDSMDVAELNWRKHSTIPLKADNIIDLDCNYKDPRLSTTLACEIYESLREAETRKMPSTNFLETTQTDMSKTMRAMLIDWLVEVTEEYRLVPETLYLTVNYIDRYLSVKEISRHRLQLVGVACLLIAAKYEEICPLQVEELCYVTDYSYTKEEVLQMEASVLNDLKFEMTVPTAKCFLRRFVHAAQVLDKGSSLHLEFLANYICELSLLDYSLLCYLPSLVAASAVFLAKYILMPIKNPWNSTLSYYTRYTPSELRGCVRLLHRLFRLGPGSNLPAIREKYSQHKYKFVAKKYCPPSIPTKFFQDLTS

SEQ ID NO: 891 - DNA, 1532 bp, Arabidopsis thaliana
  misc_feature: Ceres SEEDLINE ID no.ME11932
  misc_feature: Inplanta Sequence
  misc_feature: Encodes the peptide sequence at SEQ ID NO. 892
gcctgcagggccatcaccactgcagtggatgacgtcgtcctctccaacacagcgtactcacgtctcaattcctcctgaaccaggtccctttattcttcttcaatccctcaatttcctgattcttaactcagactttgataattcgttacttatcgctgttttcattttaccctaagcgatttgctctatcccttcaaattcccccgaagaattttgtgttattacgcctttgaatcaatcaattaaattattaagcaattaaatgcttaatttaacttcatttctgatccaaatgtctgtttagttatcaaatatttgttattaatgcatcatatttcttcagattagtgatttgaaatgtcttatggaactgtagaatgcatgagttttgattagatcatttgcagtatctctcttttgcaatttggattgtgtactaaactatcaattgttagttagtttacatttgtgttatgcaagtactgtagtagatattgtcatgaatctattgtctcatgtcttgagttgaattcttcaggaggaaagtcactaacacaagaagctaatgagccaccagttccgatatcagtttcctcgccgtgcgggaaacgaaccagagatcccgaagacgaggtctatctcgataaccttcgctctcagaaacgttatcttagcgaggtttgtttttactactcttaatatttccctaattctgctcgtttttcggtgtttaaatgtcctgagatcacgccatcatcttctgcgtagataatggcttgtagtttaaacggactaacagtaggagactcacttcctgtcaacatgttagagtctccagcacggtctgagagctttctttatcacaggtttgttgttgcatatggttgtgaagcatttgttgttgcatatggttgtcaagtttcaaaatgactatctgatgagctttattcatgtgtcgtacttaacacagggatgatttatcattacaatactctcccatgtcagaagactcggacgaagcgagattctgtgaggacccaacagcaacagcaagcactagctcatcgcaacccgagagccgcccaactagtccagtttcaccataccgataccaaagacctcttacttcaacaaactcaccacaaccgtcaccaacaatcttacaccattcacatacatgtcctgcctccatgatctccaatgcagcaactactactacaccacagtctcgccaaagaggatcagacacagaaggaaggtttccatcatcgcccagtgatatctgccattcgggtgacttgaggagaaccgctctactcaggtcggttcaaatgagaacacaaccatgtggttatagttcaagttcgggaccaagcaatattgacggtgaagagaggatgtgttctaagtctatggaagaagatagaggctataacaaaggggaagatatcccttacgctgaagtctctagtaagagcaagtcttgtaaagcattggacatgagactttgtgaaaagtgaccagagctctgg

SEQ ID NO: 892 - protein, 280 aa, Arabidopsis thaliana
  misc_feature: Ceres SEEDLINE ID no.ME11932
  misc_feature: Bit score of 583.0 for HMM based on sequences of FIGURE 15.
MTSSSPTQRTHVSIPPEPGGKSLTQEANEPPVPISVSSPCGKRTRDPEDEVYLDNLRSQKRYLSEIMACSLNGLTVGDSLPVNMLESPARSESFLYHRDDLSLQYSPMSEDSDEARFCEDPTATASTSSSQPESRPTSPVSPYRYQRPLTSTNSPQPSPTILHHSHTCPASMISNAATTTTPQSRQRGSDTEGRFPSSPSDICHSGDLRRTALLRSVQMRTQPCGYSSSSGPSNIDGEERMCSKSMEEDRGYNKGEDIPYAEVSSKSKSCKALDMRLCEK

SEQ ID NO: 893 - DNA, 798 bp, Populus balsamifera subsp. trichocarpa
  misc_feature: Ceres ANNOT ID no.1471603
  misc_feature: Encodes the peptide sequence at SEQ ID NO. 894
atgaggttggattcgaacccagcttcatcatcagcatcgacatcaacgtcaacaccaaacgggaagcgaagtagagatcctgaagatgaggtctaccttgacaatctcaattctcataagcgatacctcagtgagataatggcatctagtttgaatggattaacagttggagacccactccaggacaatcttatggaatctcctgccaggtctgacaccatgatttttgccagggatgaaatgtccttgcaatattcaccaatgtcagaagactttgatgactctagattttgcgagacccctataaatgcttgctcacctcaatctgaaagtctacccggcagtccagtttctccatataggtaccaaagaccacttggtggattctcttctgctccttatagcagctctttctcttcacatggctgcagtgtcaccgccacttattcacagcctcgtcaacgaggttcagattctgagggccggttcccgtcatcacctagtgatatatgccactcagctgacctgaggaggactgcactcctgcgttctgtgcagatgagaacacaaccacttggttcatcatcttttgaattgccatttgattcaggacacgagcctggatctaacatagaggctgaagagcggccatgctcatatatgaagtccttggttgaagagagggagtatgcacttgaagagtgttcttcaatgagcatctcagaacctggatttaatgaagagaaggcatgccgggttttgaatatgaatataaaaggggatggttctggagtttaa

SEQ ID NO: 894 - protein, 265 aa, Populus balsamifera subsp. trichocarpa
  misc_feature: Ceres ANNOT ID no.1471603
  misc_feature: Bit score of 631.7 for HMM based on sequences of FIGURE 15.
  misc_feature: Functional Homolog Of Ceres SEEDLINE ID no. ME11932 at SEQ ID NO. 892
MRLDSNPASSSASTSTSTPNGKRSRDPEDEVYLDNLNSHKRYLSEIMASSLNGLTVGDPLQDNLMESPARSDTMIFARDEMSLQYSPMSEDFDDSRFCETPINACSPQSESLPGSPVSPYRYQRPLGGFSSAPYSSSFSSHGCSVTATYSQPRQRGSDSEGRFPSSPSDICHSADLRRTALLRSVQMRTQPLGSSSFELPFDSGHEPGSNIEAEERPCSYMKSLVEEREYALEECSSMSISEPGFNEEKACRVLNMNIKGDGSGV

SEQ ID NO: 895 - DNA, 816 bp, Populus balsamifera subsp. trichocarpa
  misc_feature: Ceres ANNOT ID no.1497745
  misc_feature: Encodes the peptide sequence at SEQ ID NO. 896
atgggttcggattcgaacgcagtcccatcagcatcagcttcagcatcgacatcgacatcgacatcaacaccatcgacaccaaatgggaagcgaagtagagaccctgaagatgaggtctaccttgacaatctccattctcacaagcgttacctcagtgaaataatggcatctagtttgaatggattaacggtcggagacccactccaggacaatcttatggaatctcctgccaggtctgacaccatgttttttgccagggatgaaatgtccttgcaatattcaccaatgtcagaagactttgatgactctagattttgcgagacccctataaatgcttgctcgcctcaatctgaaagtctacccggcagtccagtttctccatataggtaccaaagaccactttgtggattctcttctgctccttatagcagctctttctcttcacatggatgcagtgtcacttcttcacagcctcgtcaacgaggctcagattctgagggtcggtttccgtcatcacctagtgatatatgccactcagctgacctgaggagggctgcactcctgcgttctgtgcagatgagaacacaacctactggttcatcatcctttgaattgccatttggttcaggacaggagcctggatcaaacatggaagctgaagagcggccatgctcatatatgaaatccttggttgaagagagggagtatccactcgaggagtgttcttcaatgagcatctcagaacctgaatttaatgaagagaaggcgtgtcgggttttaaatatgaatataaaaggggatgactctggaggttaa

SEQ ID NO: 896 - protein, 271 aa, Populus balsamifera subsp. trichocarpa
  misc_feature: Ceres ANNOT ID no.1497745
  misc_feature: Bit score of 606.2 for HMM based on sequences of FIGURE 15.
  misc_feature: Functional Homolog Of Ceres SEEDLINE ID no. ME11932 at SEQ ID NO. 892
MGSDSNAVPSASASASTSTSTSTPSTPNGKRSRDPEDEVYLDNLHSHKRYLSEIMASSLNGLTVGDPLQDNLMESPARSDTMFFARDEMSLQYSPMSEDFDDSRFCETPINACSPQSESLPGSPVSPYRYQRPLCGFSSAPYSSSFSSHGCSVTSSQPRQRGSDSEGRFPSSPSDICHSADLRRAALLRSVQMRTQPTGSSSFELPFGSGQEPGSNMEAEERPCSYMKSLVEEREYPLEECSSMSISEPEFNEEKACRVLNMNIKGDDSGG

SEQ ID NO: 897 - DNA, 891 bp, Populus balsamifera subsp. trichocarpa
  misc_feature: Ceres ANNOT ID no.1444766
  misc_feature: Encodes the peptide sequence at SEQ ID NO. 898
atgggttcggattcgaacgcagtcccatcagcatcagcttcagcatcgacatcgacatcgacatcaacaccatcgacaccaaatgggaagcgaagtagagaccctgaagatgaggtctaccttgacaatctccattctcacaagcgttacctcagtgaaataatggcatctagtttgaatggattaacggtcggagacccactccaggacaatcttatggaatctcctgccaggtctgacaccatgttttttgccagtttgcctagggatttggctgcatattatctactatttgcttatgcaaaatcaaatcccggggatcaggtgctgggggatgaaatgtccttgcaatattcaccaatgtcagaagactttgatgactctagattttgcgagacccctataaatgcttgctcgcctcaatctgaaagtctacccggcagtccagtttctccatataggtaccaaagaccactttgtggattctcttctgctccttatagcagctctttctcttcacatggatgcagtgtcacttcttcacagcctcgtcaacgaggctcagattctgagggtcggtttccgtcatcacctagtgatatatgccactcagctgacctgaggagggctgcactcctgcgttctgtgcagatgagaacacaacctactggttcatcatcctttgaattgccatttggttcaggacaggagcctggatcaaacatggaagctgaagagcggccatgctcatatatgaaatccttggttgaagagagggagtatccactcgaggagtgttcttcaatgagcatctcagaacctgaatttaatgaagagaaggcgtgtcgggttttaaatatgaatataaaaggggatgactctggaggttaa

SEQ ID NO: 898 - protein, 296 aa, Populus balsamifera subsp. trichocarpa
  misc_feature: Ceres ANNOT ID no.1444766
  misc_feature: Bit score of 586.5 for HMM based on sequences of FIGURE 15.
  misc_feature: Functional Homolog Of Ceres SEEDLINE ID no. ME11932 at SEQ ID NO. 892
MGSDSNAVPSASASASTSTSTSTPSTPNGKRSRDPEDEVYLDNLHSHKRYLSEIMASSLNGLTVGDPLQDNLMESPARSDTMFFASLPRDLAAYYLLFAYAKSNPGDQVLGDEMSLQYSPMSEDFDDSRFCETPINACSPQSESLPGSPVSPYRYQRPLCGFSSAPYSSSFSSHGCSVTSSQPRQRGSDSEGRFPSSPSDICHSADLRRAALLRSVQMRTQPTGSSSFELPFGSGQEPGSNMEAEERPCSYMKSLVEEREYPLEECSSMSISEPEFNEEKACRVLNMNIKGDDSGG

SEQ ID NO: 899 - protein, 498 aa, Sorghum bicolor
  misc_feature: Ceres ANNOT ID no.6016012
  misc_feature: Bit score of 572.5 for HMM based on sequences of FIGURE 16.
  misc_feature (137)..(157): Pfam Name: IQ Pfam Description: IQ calmodulin-binding motif
  misc_feature: Functional Homolog Of Ceres SEEDLINE ID no. ME24091 at SEQ ID NO. 922
MGKKGKWFSAVKKVFSSSGTDGKEAKAEKADKSKSKRRWPFGKTKKHSEPSISTVAGTAPVAPLPSPPPTQPHSLEIKDVNPLETDSEQNKHAYSVALASAVAAEAAAVAAQAAAEVVRLTAVTTAAPKMPVSSMEELAATKIQTAFRGYLARRALRALRGLVRLKSLVDGNAVKRQTAHTLQCTQTMTRVQTQIYSRRVKLEEEKQALQRQLQLKHQRELEKMKIDEDWDHSHQSKEQIEANLMMKQEAAMRRERALAYAFSHQWRTSGRTITPTFTEPGNPNWGWSWMERWMTARPWESRLVASDKDPKERALTKNPSTITVQAASVPRAISIQRPATPNKSSRPPSRQSPSTPPSKAPSTSGKTRPASPRGNWLYKEDDLRSITSIRSERPRRQSTGGGGSVRDDASLTSTPPLPSYMQSTESARAKSRYRSLLTEKLEVPERAPLVHSVVKKRLSFPVVDKPSVVPTDKPKERVRRHSDPPKVDPATLKDVPAA

SEQ ID NO: 900 - DNA, 1124 bp, Arabidopsis thaliana
  misc_feature: Ceres CLONE ID no.1343264
  misc_feature: Encodes the peptide sequence at SEQ ID NO. 901
gatcaaaaaagaaaaaaaaactcaggaagaatctagttgcggttatcttcagcccaaagagtaaagacccatccatccgttgctgaatctgctgctttgatcgaaaatgacgtcgtcctctccaacacagcgtactcacgtctcagttcctcctgaaccaggaggaaagtcactaacacaagaagctaatgagccaccagttccgatatcagtttcctcgccgtgcgggaaacgaaccagagatcccgaagacgaggtctatctcgataaccttcgctctcagaaacgttatcttagtgagataatggcttgtagtttaaacggactaacagtaggagactcacttcctgtcaacatgttagagtctccagcacggtctgagagctttctttatcacagggatgatttatcattacaatactctcccatgtcagaagactcggacgaagcgagattctgtgaggacccaacagcaacagcaagcactagctcatcgcaacccgagagccgcccaactagtccagtttcaccataccgataccaaagacctcttacttcaacaaactcaccacaaccgtcaccaacaatcttacaccattcacatacatgtcctgcctccatgatctccaatgcagcaactactactacaccacagtctcgccaaagaggatcagacacagaaggaaggtttccatcatcgcccagtgatatctgccattcgggtgacttgaggagaaccgctctactcaggtcggttcaaatgagaacacaaccatgtggttatagttcaagttcgggaccaagcaatattgacggtgaagagaggatgtgttctaagtctatggaagaagatagaggctataacaaaggggaagatatcccttacgctgaagtctctagtaagagcaagtcttgtaaagcattggacatgagactttgtgaaaagtgatgaaagaggctctatgaagctgacatggcaatcctccttttaacagtgttaaaaaataaaaatccaaatatattaatatccgtttttattttctttagttataatttttttttttaaagttgtgaggtatgttaaaattttttttttaattaaagaacataaagttatttggatt

SEQ ID NO: 901 - protein, 280 aa, Arabidopsis thaliana
  misc_feature: Ceres CLONE ID no.1343264
  misc_feature: Bit score of 582.9 for HMM based on sequences of FIGURE 15.
  misc_feature: Functional Homolog Of Ceres SEEDLINE ID no. ME11932 at SEQ ID NO. 892
MTSSSPTQRTHVSVPPEPGGKSLTQEANEPPVPISVSSPCGKRTRDPEDEVYLDNLRSQKRYLSEIMACSLNGLTVGDSLPVNMLESPARSESFLYHRDDLSLQYSPMSEDSDEARFCEDPTATASTSSSQPESRPTSPVSPYRYQRPLTSTNSPQPSPTILHHSHTCPASMISNAATTTTPQSRQRGSDTEGRFPSSPSDICHSGDLRRTALLRSVQMRTQPCGYSSSSGPSNIDGEERMCSKSMEEDRGYNKGEDIPYAEVSSKSKSCKALDMRLCEK

SEQ ID NO: 902 - DNA, 869 bp, Brassica napus
  misc_feature: Ceres CLONE ID no.949027
  misc_feature: Encodes the peptide sequence at SEQ ID NO. 903
aaccgctttatagagattcgttgatacactgtaaaatttgttagggtttgaaaatggggccggaatcgcgatcgacgccgatatcagcatcgtcgccggcgtcgtcttcttcgccgagcgggaaacgaacaagagatccggaagacgacgaggtctatctcgacaacctccgctcccagaaacgttatctcagcgagataatggcttgcagtttaaacggactaaccgtcggagactcgcttcctgtcaacatgttagactctccttctcgctctgacacccttctttctcccaacaatcacattcacagggatgacttgtcattacagtactctcccatgtctgaagactccgacgaagctaggttctgcgaggacccaataacaagcacgagctcatcgcagcaacccgagagccgccctactagtcctgtttcaccttaccgataccatagacctcttacttcaacaacctcacaccatttgtcaaattcacattcatgccctgcctccatgagcaccaatgctactactccacagtctcgtccaagaggatcagacacggaaggaaggtttccatcgtcgcctagcgacatctgccattccagtgacttgagaaggaccgctctactcaggtctgttcaaatgagaacacagccttgtggtattgcttcaacttytgggacaagcaatgttgacggtggtgaagagaagttgtgctttaagtctatggaagaagataatagaggggaagatgtctcttatactcaagtctccggcggtaagagcaagtcttgtaaagcattggacatgagactatgtgaacgatgatttaaagacactattctctatcttaaaatacggtttctt

SEQ ID NO: 903 - protein, 258 aa, Brassica napus
  misc_feature: Ceres CLONE ID no.949027
  misc_feature: Bit score of 543.1 for HMM based on sequences of FIGURE 15.
  misc_feature: Functional Homolog Of Ceres SEEDLINE ID no. ME11932 at SEQ ID NO. 892
  misc_feature (209)..(209): Xaa is any aa, unknown, or other
MGPESRSTPISASSPASSSSPSGKRTRDPEDDEVYLDNLRSQKRYLSEIMACSLNGLTVGDSLPVNMLDSPSRSDTLLSPNNHIHRDDLSLQYSPMSEDSDEARFCEDPITSTSSSQQPESRPTSPVSPYRYHRPLTSTTSHHLSNSHSCPASMSTNATTPQSRPRGSDTEGRFPSSPSDICHSSDLRRTALLRSVQMRTQPCGIASTXGTSNVDGGEEKLCFKSMEEDNRGEDVSYTQVSGGKSKSCKALDMRLCER

SEQ ID NO: 904 - DNA, 1173 bp, Glycine max
  misc_feature: Ceres CLONE ID no.527044
  misc_feature: Encodes the peptide sequence at SEQ ID NO. 905
gactgctgtgtttcactgccaatgacggaagacggaaagggaagccgaagccatctctgcacaacaaattagggtttcaacattgagcagtccctttttcttcaccaaagagaaagccttggtttagatgagttggtctcamcaatgggttctgattccaatttgggagggtcgccctcagcatcttcgcccagtgccaagcgcaccagagatcccgaagaggaagtttatctcgacaatcttcgctctcacaagcgttacctaagcgagataatggcatccagtctcaacggattgacagttggagactcacttcctgataatctcatggaatctccagcaaggtctgaaagcatgttctctttcagagatgatatgtctttacaatattcaccgatgtcagaagattcagatgacctaaggttttgcgagacccctgtgcacagttgctcatcccaaccggacagtcttcccagtagtccagtttctccacacaggtaccaaagaccacagaatgcattgccttcagcaccttcttcaagttcaaatgcctcttatggctccaccattgcttgcccccagcctcgtcagcgagggtcggattctgaaggccgcttcccatcatccccaagtgatatatgccactcagctgacttgagaagagctgcacttstaagatctgtgcagatgagaacacagcctcctggccctgcatctttggacctgccttttgtttctaaccaagagtctgctcctaacatagatcctgaggaaagatcttgctcatatatgaaatctctggttgacgagagagagtattgagagttcatcaatgggtattccgtaaccccgatttcaaccttggtcatggtattacgccgtgcaggtcttaatgtgtttggaaggttaacttgctatattggagaattgtctcagtatcactatccagcgtctcctagtacgagatggttgcttgtgttagtcttggtcttgtttatgggattttgttcctccagctgctctctagtaaattatgcgtacagtcctgtgcctccggaattttactttattataattttcattcgagatagttgattattgcgttcatttcttataatttataggcttaaacaacttttaagtccatataatataatataatttttatttttg

SEQ ID NO: 905 - protein, 225 aa, Glycine max
  misc_feature: Ceres CLONE ID no.527044
  misc_feature: Bit score of 460.3 for HMM based on sequences of FIGURE 15.
  misc_feature: Functional Homolog Of Ceres SEEDLINE ID no. ME11932 at SEQ ID NO. 892
  misc_feature (177)..(177): Xaa is any aa, unknown, or other
MGSDSNLGGSPSASSPSAKRTRDPEEEVYLDNLRSHKRYLSEIMASSLNGLTVGDSLPDNLMESPARSESMFSFRDDMSLQYSPMSEDSDDLRFCETPVHSCSSQPDSLPSSPVSPHRYQRPQNALPSAPSSSSNASYGSTIACPQPRQRGSDSEGRFPSSPSDICHSADLRRAALXRSVQMRTQPPGPASLDLPFVSNQESAPNIDPEERSCSYMKSLVDEREY

SEQ ID NO: 906 - protein, 264 aa, Medicago truncatula
  misc_feature: Public GI ID no.92877259
  misc_feature: Bit score of 647.0 for HMM based on sequences of FIGURE 15.
  misc_feature: Functional Homolog Of Ceres SEEDLINE ID no. ME11932 at SEQ ID NO. 892
MGFDSNLGGSPSSSSPSSKRTRDPEEEVYVDNLRSHKRYLSEIMASSLNGLTVGDSLPDNLMESPARSESAFSLRDDMSLQYSPMSEDSDDSRFCETGLHSCSSHPDSRPGSPVSPCRYQRSQNTFSSAPSTSLNGSHGFSVSAVTCSQPRQRSSDSDGRFPSSPSDICHSADLRRAALLRSVQMRTHPPGSASLELPFGSGQEPPPNIDPEERPCSYLKSMVDERDYQIEECSPIGIPEPEFNHDNKPCRVLNMNPKEADSGG

SEQ ID NO: 907 - protein, 265 aa, Pisum sativum
  misc_feature: Public GI ID no.61611694
  misc_feature: Bit score of 639.9 for HMM based on sequences of FIGURE 15.
  misc_feature: Functional Homolog Of Ceres SEEDLINE ID no. ME11932 at SEQ ID NO. 892
MGFDSNLGGSPSSSSPTAKRTRDPEEEVYVDNLRSHKRYLSEIMASSLNGLTVGDSLPDNLLESPARSESAFSLRDDISLQYSPMSEDSDDSRFCETPVHSCLTNLDSRPSSPVSPCRYQRQQNSFSSAPSTSLNTSHGFPVSAVTCSQPRQRSSDSDGRFPSSPSDICHSADLRRAALLRSVQMRTHPPGSASLELPFGSGQEPAPNIDSEDRPCSYMKSLVDERDYQIEECSSIGAPETEFNHDNNKPCRVLNMNPKAADSGG

SEQ ID NO: 908 - DNA, 1217 bp, Triticum aestivum
  misc_feature: Ceres CLONE ID no.779610
  misc_feature: Encodes the peptide sequence at SEQ ID NO. 909
ctcacttttccccttcgactcttctctagctcccaccctcacctccaagaagcagccaatccagcaacccgtgccgccgcgccgcgccgcgcggatggcgggtggcagcggcgagggcgccgcaatgtcgccgccttcctcctccggcgttggcggcggcggcggtggcggaaagcgcgggagggatccggaggaggacgtgtacgtggacaacctccactcccacaagcggtacctcagcgagataatggcgtccagcctgaatgggctctctgttggagattcgcttgccgacaacatcatggagtcccctgcgaggtcggagagttcctcttgtatcagggacgaaataatctcccaatactcaccaatgtcagaagactcagatgactaccggtacttcgacacacaactaaaccccaacgggagtcaaggtgatgcaatggtcagcccatcaactagtccaatgtcatctcctcaccggttccagaaaccacaagctagtttcctaccatcaagcccatatcctctccccagctgctccctctcatccgtggcttgctctcaccctcggcgtggctctgagaatgaaggccggttcccgtcttcacccaatgacatgtgccatggcgcggacctgaggcgaacggcactactgaggtcggtgcaaatgagggtgcatggtccccatgcgtacgacccatcattcggcagccggcaggagcaagaacatgtccatgagcatgatgatgaacatggtcatgagcatctggaagatttgggagggccagaaagaccatcttgcaggaaatcaattgataatgaagctagtggctaccagggggctgaaaacagctatgggcggcaggagcatgatatcgattacatcgacggctgcacagctgatgatgtcttgagtggccccaagttcaagcaagaagatgataaccaaggtaattctgacgccagcatggataaaactagataggtactatcagagtgcaatcacaccatgcaattgttgtagtattaattatggcaatgggagatcaggttttttgctgttgtaattttctatgcagttggatttgttgcaatctggctgctttccgcaattttgaaattgtggcatttgagtacctgtctgctgtttgaacgaaaaagtcttgcggagagtgatttatagtatatccgtgcatgcaatgttttttctgatt

SEQ ID NO: 909 - protein, 297 aa, Triticum aestivum
  misc_feature: Ceres CLONE ID no.779610
  misc_feature: Bit score of 713.8 for HMM based on sequences of FIGURE 15.
  misc_feature: Functional Homolog Of Ceres SEEDLINE ID no. ME11932 at SEQ ID NO. 892
MAGGSGEGAAMSPPSSSGVGGGGGGGKRGRDPEEDVYVDNLHSHKRYLSEIMASSLNGLSVGDSLADNIMESPARSESSSCIRDEIISQYSPMSEDSDDYRYFDTQLNPNGSQGDAMVSPSTSPMSSPHRFQKPQASFLPSSPYPLPSCSLSSVACSHPRRGSENEGRFPSSPNDMCHGADLRRTALLRSVQMRVHGPHAYDPSFGSRQEQEHVHEHDDEHGHEHLEDLGGPERPSCRKSIDNEASGYQGAENSYGRQEHDIDYIDGCTADDVLSGPKFKQEDDNQGNSDASMDKTR

SEQ ID NO: 910 - DNA, 1081 bp, Zea mays
  misc_feature: Ceres CLONE ID no.226231
  misc_feature: Encodes the peptide sequence at SEQ ID NO. 911
tttccctaatccccatctccccttctctcgctgctggtggcctgcgaatggcgggcggaagcggcgaggcggctatgtctccgccgtcctctagtgccagcgggaagcgcgggcgggacccggaggaggacgtgtacgtggacaatctccattcccacaaacggtatctcagcgagataatggcatccagtctgaatggactgtctgttggggattcactgcctgacaacatcatggagtcccctgcaaggtcagagactgcttcctgctacagggatgagatattatcccaatactcaccgatgtcagaagactcggatgattaccggtgctatgacactcaattaaaccccagtgggaatcatcctgatgcgatgatcagcccttcaactagcccaatgtcatctcctcatcgacaccagagaccacaatcttctttgttaccttcaaacccataccctctcccaagctgctccctttcgtcagtagtctgctctcatgctcggcgtggctccgataatgaaggccggttcccgtcctcgccaaatgacatgtgccatgtagcagatttgaggcgaacagcactactgaggtcagtgcaaatgagggtgcagggaccccattcgtatgacctatcattcggcatcagacaaggacaagwtcatgcacatgagcatgaaggggaacatgaccatgagcatgaacatctagaggacttggaagggacagaaggatcatcttgcaataagtcaatcgttaacgaagtcacgtacaaccagagacgtgaccatgattttggtcggtcagagcacgagatagattacatcaacaacagcacatcagatgattgtgtaagtgatctaaaatttaagcaagaagataagagccatagtaaatttgatatccctatgcacaaaaattcatagcacatggaacatatgtgttagttttttggattataactctacttaacttcattgtattcttgacggatgccttatctattgtccgtggttttagcatcagcgttctgaatagcgacattgtaatatttgagtgaaattaacctttggattgttgc

SEQ ID NO: 911 - protein, 292 aa, Zea mays
  misc_feature: Ceres CLONE ID no.226231
  misc_feature: Bit score of 718.4 for HMM based on sequences of FIGURE 15.
  misc_feature: Functional Homolog Of Ceres SEEDLINE ID no. ME11932 at SEQ ID NO. 892
  misc_feature (205)..(205): Xaa is any aa, unknown, or other
MAGGSGEAAMSPPSSSASGKRGRDPEEDVYVDNLHSHKRYLSEIMASSLNGLSVGDSLPDNIMESPARSETASCYRDEILSQYSPMSEDSDDYRCYDTQLNPSGNHPDAMISPSTSPMSSPHRHQRPQSSLLPSNPYPLPSCSLSSVVCSHARRGSDNEGRFPSSPNDMCHVADLRRTALLRSVQMRVQGPHSYDLSFGIRQGQXHAHEHEGEHDHEHEHLEDLEGTEGSSCNKSIVNEVTYNQRRDHDFGRSEHEIDYINNSTSDDCVSDLKFKQEDKSHSKFDIPMHKNS

SEQ ID NO: 912 - DNA, 1212 bp, Zea mays
  misc_feature: Ceres CLONE ID no.336655
  misc_feature: Encodes the peptide sequence at SEQ ID NO. 913
ctagtaacgggaagcggctttgttgcattgcatcacaagttcacagctcgcccggacccagagggagcttgtacttccaaagttccacagttccactgcacagatcgtcggcggcggcgcaggcaaggccacaatgtctccggcgcccagcagcggcaagcgcgggagggttcccgacccggaggaggacgtctacgtcgacaacctccactcccacaagcgctacctcaccgagataatggcatccagcatgaatggcttgtccgttggagattcagttcctgacaatatcatggggtccccaatgagagtggagaatgcttcttgcattagggatgagatgagtatgcagtactcacctatgtcagaagagtcagatgattataggtactatgacactcaagtaaacaccaatgggaatcaaacagatgtactgggtaatccctcaactagtctaatctcatctgcacaccgttttcagaggccacacacttggttctcttctgcaagtccataccctctcccaagctgctccctcccagcagtgatctgctcccctgctcgccgtggttgtggcactgaacaggaaggctggatcccatcctcacctaatgacatgtgctatggtggagatctgagacgaaccgcacttctgaggtcagttcaaatgaaggtgcagagcccccatccatgtgatgtgcatgaacgagaacaagggcgttctaatgtacatgctgacgagcttcaacaggatcagaaagaagctgtgggtgtacagctggaccaaaggcctctctcttgtccaaagtcaacccaggatgctaagtgccagagctctatacactgatgacgcggattttgttgaggatcagattacggtgtgaccagtcaaagtttgtcgaggatcatcacatatctggtaattttttgcgtagatttggatgaccataaataatactccctgtttcccaatatattgttcgtcctggcggatctattgacaccctaaaacgaatactattttgggttggagggagggagcatgttgcatggcccgttcgtaatttagtaaccattaacagtattctagtggtggcctgccccgttcgatgaacttatgtgacactaggttgtaagaagatgggacactaattaatcttgatcttagaaatgcaatgtgatgtagatgatatcagtgcttttattatgatt

SEQ ID NO: 913 - protein, 237 aa, Zea mays
  misc_feature: Ceres CLONE ID no.336655
  misc_feature: Bit score of 313.6 for HMM based on sequences of FIGURE 15.
  misc_feature: Functional Homolog Of Ceres SEEDLINE ID no. ME11932 at SEQ ID NO. 892
MSPAPSSGKRGRVPDPEEDVYVDNLHSHKRYLTEIMASSMNGLSVGDSVPDNIMGSPMRVENASCIRDEMSMQYSPMSEESDDYRYYDTQVNTNGNQTDVLGNPSTSLISSAHRFQRPHTWFSSASPYPLPSCSLPAVICSPARRGCGTEQEGWIPSSPNDMCYGGDLRRTALLRSVQMKVQSPHPCDVHEREQGRSNVHADELQQDQKEAVGVQLDQRPLSCPKSTQDAKCQSSIH

SEQ ID NO: 914 - protein, 315 aa, Oryza sativa subsp. indica
  misc_feature: Public GI ID no.125550908
  misc_feature: Bit score of 658.0 for HMM based on sequences of FIGURE 15.
  misc_feature: Functional Homolog Of Ceres SEEDLINE ID no. ME11932 at SEQ ID NO. 892
MSPPSGGGKRGRDPEEDVYVDNLHSHKRYLSEIMASSLNGLSVGDSLVDNIMESPARSENTSYFRPCGRSTLFDDRTLAQVTFFNMPMNTHLDTHADDTSTLQDEIISQYSPMSEDSDDYRCYDTQLPNGSQTDAMVSPSTSPMSSPHRFQKPQSGLLSANPYPLPSCSLSSVVCSNPRRGSENEGRFPSSPNDMCHGGDLRKTALLRSVQMRVQGPHAYELSFCGRQEQEHAHDHEDEHQHEHLEGLEGAERSSSHRETISDGVGYQMPENSYGRPEHDIDYIEDCTPHGCLSDLKFKQEDKDCSKLTSMDKNR

SEQ ID NO: 915 - protein, 288 aa, Oryza sativa subsp. japonica
  misc_feature: Public GI ID no.115462191
  misc_feature: Bit score of 702.0 for HMM based on sequences of FIGURE 15.
  misc_feature: Functional Homolog Of Ceres SEEDLINE ID no. ME11932 at SEQ ID NO. 892
MVGGGGGGEAAMSPPSGGGKRGRDPEEDVYVDNLHSHKRYLSEIMASSLNGLSVGDSLVDNIMESPARSENTSYFRDEIISQYSPMSEDSDDYRCYDTQLPNGSQTDAMVSPSTSPMSSPHRFQKPQSGLLSANPYPLPSCSLSSVVCSNPRRGSENEGRFPSSPNDMCHGGDLRKTALLRSVQMRVQGPHAYELSFCGRQEQEHAHDHEDEHQHEHLEGLEGAERSSSHRETISDGVSYQMPENSYGRPEHDIDYIEDCTPHGCLSDLKFKQEDKDCSKLTSMDKNR

SEQ ID NO: 916 - protein, 277 aa, Oryza sativa subsp. japonica
  misc_feature: Public GI ID no.125592880
  misc_feature: Bit score of 684.6 for HMM based on sequences of FIGURE 15.
  misc_feature: Functional Homolog Of Ceres SEEDLINE ID no. ME11932 at SEQ ID NO. 892
MSPPSGGGKRGRDPEEDVYVDNLHSHKRYLSEIMASSLNGLSVGDSLVDNIMESPARSENTSYFRDEIISQYSPMSEDSDDYRCYDTQLPNGSQTDAMVSPSTSPMSSPHRFQKPQSGLLSANPYPLPSCSLSSVVCSNPRRGSENEGRFPSSPNDMCHGGDLRKTALLRSVQMRVQGPHAYELSFCGRQEQEHAHDHEDEHQHEHLEGLEGAERSSSHRETISDGVSYQMPENSYGRPEHDIDYIEDCTPHGCLSDLKFKQEDKDCSKLTSMDKNR

SEQ ID NO: 917 - DNA, 885 bp, Sorghum bicolor
  misc_feature: Ceres ANNOT ID no.6054932
  misc_feature: Encodes the peptide sequence at SEQ ID NO. 918
atgggggccggaagcggagaggcggcgatgtctccgccgtcctccggcggcagcggaagcggcggcgggaagcgcgggcgggacccggaggaggacgtgtacgtggacaatctccactcccacaagcggtacctcagcgagataatggcgtccagtctgaatggactgtctgttggggattcactgcctgacaacatcatggagtcccctgcaaggtcagagactgcttcttgcttcagggatgagatattatcccaatactcgccaatgtcagaagactcagatgattaccggtgctatgacactcaattaaaccccagtgggaatcatcctgatgcgatgatcagcccttcaactagtccaatgtcatctccccaccgacaccagagaccacaatctcctctgttaccttcaaacccataccctctcccaagctgctccctttcatcggtagtctgctctcatgctcggcgtggctccgataatgaaggtcggttcccatcctcaccaaatgacatgtgccacggggcagatctgaggcgaacagcactgctgaggtcagtgcaaatgagggtgcagggaccccattcgtacgacctatcattcggcatgagacaaggacaagaacatgtacatgagcatgaagatgaacatgagcatgaacatctagaggatttggaaaggacagaaaggtcatcatcttgcaataagtcaatcgttgacgaaatcgcgtaccagagacctgaccatgattttggtcaaccagagcacgagatagattacatcaacaactgcacatcagatgattgtccaagtgacctaaaatttaagcatgaagataagagccatagtaaatttgatacccgtatggacaagaatacatag

SEQ ID NO: 918 - protein, 294 aa, Sorghum bicolor
  misc_feature: Ceres ANNOT ID no.6054932
  misc_feature: Bit score of 693.7 for HMM based on sequences of FIGURE 15.
  misc_feature: Functional Homolog Of Ceres SEEDLINE ID no. ME11932 at SEQ ID NO. 892
MGAGSGEAAMSPPSSGGSGSGGGKRGRDPEEDVYVDNLHSHKRYLSEIMASSLNGLSVGDSLPDNIMESPARSETASCFRDEILSQYSPMSEDSDDYRCYDTQLNPSGNHPDAMISPSTSPMSSPHRHQRPQSPLLPSNPYPLPSCSLSSVVCSHARRGSDNEGRFPSSPNDMCHGADLRRTALLRSVQMRVQGPHSYDLSFGMRQGQEHVHEHEDEHEHEHLEDLERTERSSSCNKSIVDEIAYQRPDHDFGQPEHEIDYINNCTSDDCPSDLKFKHEDKSHSKFDTRMDKNT

SEQ ID NO: 919 - DNA, 783 bp, Sorghum bicolor
  misc_feature: Ceres ANNOT ID no.6096924
  misc_feature: Encodes the peptide sequence at SEQ ID NO. 920
atgtctccggcgcccagcggcggcaagcgcgggagggtccccgacccggaggaggacgtctacgtcgacaacctccactcccacaagcgctacctcaccgagataatggcatccagcatgaatggcttgtccgttggagattcagttgctgacagtgtcatggggtccccaatgagactggagaatgtttcttgcattagggatgagataagcatgcagtactcacgtgtgtcagaagagtcagatgattacagatactatgagactcaagtaaacaccaatgggaatcaaacagatgtactgggtaattcgtcaactagtccagcttcatctccacgccgtgtccagaagctacacaactggttctcttctgcatgttcatacactctcccaagctgctccctcccagcagtggtctgctcgcctgctccccgtggttgtggcactgaacaggaaggccggatcccatcctcacctaatgacatgtgccatggtggagatctgaggcgagctgcacttttgagatcggtgcaaatgagggctcagagcccccatccatgtgatgtgctacccagcggtggacatgaacaagaacaagggctttctgatgtacatgctgacgagcttgaacaggatcagaaagaagctgtgggtgtacagttggatcaaaggcctctctcttgtccaaagtcaacccaggatgctgagtaccagagccctataaaccgagaccaacatcctcaccatgacgttgattttgtcaaggatcagattacggtgtga

SEQ ID NO: 920 - protein, 260 aa, Sorghum bicolor
  misc_feature: Ceres ANNOT ID no.6096924
  misc_feature: Bit score of 303.6 for HMM based on sequences of FIGURE 15.
  misc_feature: Functional Homolog Of Ceres SEEDLINE ID no. ME11932 at SEQ ID NO. 892
MSPAPSGGKRGRVPDPEEDVYVDNLHSHKRYLTEIMASSMNGLSVGDSVADSVMGSPMRLENVSCIRDEISMQYSRVSEESDDYRYYETQVNTNGNQTDVLGNSSTSPASSPRRVQKLHNWFSSACSYTLPSCSLPAVVCSPAPRGCGTEQEGRIPSSPNDMCHGGDLRRAALLRSVQMRAQSPHPCDVLPSGGHEQEQGLSDVHADELEQDQKEAVGVQLDQRPLSCPKSTQDAEYQSPINRDQHPHHDVDFVKDQITV

SEQ ID NO: 921 - DNA, 1939 bp, Arabidopsis thaliana
  misc_feature: Ceres SEEDLINE ID no.ME24091
  misc_feature: Inplanta Sequence
  misc_feature: Encodes the peptide sequence at SEQ ID NO. 922
acaaatactcttcttcacacagctttgaatccatctgtcttctcctctctctctcttctccatttgcaattacgataatgtgaaagcaataagaagaggaaaagttatcttcgcacctcagcaaagatccaatcgattcgattcttaagctttttcgtcttctccgataaggtcactacttagaagccgcgttgtggtttagttgactcctccaggttttatcttcaagctttttcgtctatcagatctggtgtcactgtcttctcataggattacatagagatggggaaaaaagctaaatggttttcaagtgttaagaaagcattcagcccagattcaaagaagtcgaagcaaaaattggctgagggacaaaatggtgttatctctaatcctcctgttgtggataatgttagacaatcttcttcttctcctcctcctgctcttgctcctcgtgaagtgagagtagctgaagtgattgttgaacggaacagggatctttcacctccttctacagcagatgctgtgaatgttacagctactgatgttcctgtagttccatcttcatctgctcctggtgttgttcgtcgcgctacacctactcgatttgctggaaagtcaaacgaagaagccgctgctatcttgatccagactatatttagaggttatttggcaaggagagcgttgcgggcaatgaggggtttggtcagacttaagttattgatggaaggatctgttgttaagcggcaagctgcaaatactctaaaatgtatgcagactctctctcgtgtacagtcgcagatccgagctaggagaatcaggatgtcagaagagaatcaggctcgccagaaacaactccttcagaaacatgctaaagagctagctggcttgaagaacggggataactggaatgatagcattcaatcaaaggagaaagttgaagcgaatttgctaagcaagtacgaggcaacaatgagaagggaaagggcattggcttattcatactctcatcagcaaaactggaagaacaactctaaatctggaaacccgatgttcatggatccaagcaacccgacatggggttggagctggttggagagatggatggctggtaggccactagagagttccgagaaagaacaaagcaacagcaacaatgacaatgctgcctcggtcaagggctctattaaccgcaacgaagctgcaaaatctctaacccgcaatggctcaactcaaccaaacacaccatcatccgcaagagggaccccaagaaacaaaaacagtttcttctcacctccaactccctcaaggctaaaccaatcctcgaggaaatccaatgacgacgactccaaaagcacaatctcggtcctgtccgagaggaaccgcagacacagcattgctggttcatcagtcagagacgatgagagcctcgctggctcaccagctctcccgagctacatggttccaactaaatcagctcgagccaggctcaagccccaaagcccattaggtggtaccacacaggaaaacgaagggttcacagacaaggcatcagctaagaaacggctctcgtatccaacttcgcctgcattgcctaaaccacggcggttctcagctccccctaaggtggagagtggcggcgttaccgtgaccaacggagcaggcagctgaggtattttatttaatataattattttcccacttatgaatgtgtccgagattgttgtctcttatgtgttcccttcatttcgtaattcatttgtgcagtgtaagcgccagtcatttatttttttactataataaattttataaccttttaaaattcatgttcttttgtttctttgaatatttaagttatttttattaatgttggatgaattggaatatgatgatgttatttgtattgtaatgcagatcctttaaagcaaaaaaaaaaaaaaaa

SEQ ID NO: 922 - protein, 461 aa, Arabidopsis thaliana
  misc_feature: Ceres SEEDLINE ID no.ME24091
  misc_feature: Bit score of 1104.1 for HMM based on sequences of FIGURE 16.
  misc_feature (115)..(135): Pfam Name: IQ Pfam Description: IQ calmodulin-binding motif
MGKKAKWFSSVKKAFSPDSKKSKQKLAEGQNGVISNPPVVDNVRQSSSSPPPALAPREVRVAEVIVERNRDLSPPSTADAVNVTATDVPVVPSSSAPGVVRRATPTRFAGKSNEEAAAILIQTIFRGYLARRALRAMRGLVRLKLLMEGSVVKRQAANTLKCMQTLSRVQSQIRARRIRMSEENQARQKQLLQKHAKELAGLKNGDNWNDSIQSKEKVEANLLSKYEATMRRERALAYSYSHQQNWKNNSKSGNPMFMDPSNPTWGWSWLERWMAGRPLESSEKEQSNSNNDNAASVKGSINRNEAAKSLTRNGSTQPNTPSSARGTPRNKNSFFSPPTPSRLNQSSRKSNDDDSKSTISVLSERNRRHSIAGSSVRDDESLAGSPALPSYMVPTKSARARLKPQSPLGGTTQENEGFTDKASAKKRLSYPTSPALPKPRRFSAPPKVESGGVTVTNGAGS

SEQ ID NO: 923 - DNA, 1726 bp, Gossypium hirsutum
  misc_feature: Ceres CLONE ID no.1942871
  misc_feature: Encodes the peptide sequence at SEQ ID NO. 924
gtttcttcttcaatttgtctgaaaaacataacctttccttcttctcaagatctgtttttgttctttctctgtaactgtttaccgacacacacacaaaaaaaaagttcgttcttccgaatttcttgagatctgggcattattgtttcaggatcatatcgaggaaagaaaagatggggaagaaagtaaaatggctatcttctttaaagaaagccttcaatccagagtcaaaggaaaagaaaaatcagattttggataagcaagtgcatttgggtcctagtagttctaatgcggctgcacccacattagaaactgttaatttgtcccctccacctcagccggaagatgagaaaataatcaaacccgagacggttgctgaagctaccgatgatgatgttgttgttgctccagctgttccgaccccggctgctgttacggtcgttcaacgccgacttaatatagactctcggtttgctggaaaatctatggaggaagttgcagcgatcaaaattcagacagcttttcgagtttacatggcgaaaagagcattgtgtgctttacgaggacttgtgaggctgaaatcgttaatggaaggacctgcggtgaaacggcaagtgacgagtacccttcgttgtatgcaaacactttctcgtgtgcagtgtcagattcggatgaggagaatccgtatgaccgaagaaaatcaagctcttcagagacaaatcttgcagaaacatgcgaaagagcttgtgaatttgcagatgggggaagattgggacgatagcttgcaatcgaaggaacaaatcgaagcgagcttattgagcaaacacgaggctgcaatgagacgagaaagggcaatggcttattcatttactcatcagcaaacttggaagaacggttcgaaatctatgaatccgttattcatggatatgaacaacctgacgtggggttggagttggttagaacgatggatggcagctcgaccatgggaaggacgtggcgtgacgggaaaggaaccgaacaacgaccagtcatcggtaaagagtgcacatttcgaaggagaaatcagcaaagcttacgctcgttaccaactcaatttggataataaacaatccccgaaatcgagccaaaagcctaaccgaacatcaagtcacctatccccttctccgaaaccaccttccacaccatccccaaagctgaagtccgcaagccctagcggcagtatcattgcccaggacgacgacacaagaagcatagtcagcgcgcaatccgaacggaaccgaagacacagcattgccggctcattggtgcgtgacgacgagagcttagcaagctcgccgtcacttccgagttatatggtaccaactaaatcggcaagagccaaaaccaggttgcaaagtcccttgggactagaagcaaatggtacacccgacaaaggaccgatcatgtcgaccaaaaaacgactcttgtatccaccttcaccggccaaaccgaggcggcactctggtccaccgagagtcgataccagcattattactaatacaaaaattggtgcggtgaatggtggtgtcatttaatttctctatatttttaattcatacaggttttatttgtgagatttgagaacaaactacgcataatttttagttcattgacaatttgttcattataattcttgtgctggtgttgtattgatttgtataataaattatatacattacttgtttatttt

SEQ ID NO: 924 - protein, 466 aa, Gossypium hirsutum
  misc_feature: Ceres CLONE ID no.1942871
  misc_feature: Bit score of 1177.5 for HMM based on sequences of FIGURE 16.
  misc_feature (107)..(127): Pfam Name: IQ Pfam Description: IQ calmodulin-binding motif
  misc_feature: Functional Homolog Of Ceres SEEDLINE ID no. ME24091 at SEQ ID NO. 922
MGKKVKWLSSLKKAFNPESKEKKNQILDKQVHLGPSSSNAAAPTLETVNLSPPPQPEDEKIIKPETVAEATDDDVVVAPAVPTPAAVTVVQRRLNIDSRFAGKSMEEVAAIKIQTAFRVYMAKRALCALRGLVRLKSLMEGPAVKRQVTSTLRCMQTLSRVQCQIRMRRIRMTEENQALQRQILQKHAKELVNLQMGEDWDDSLQSKEQIEASLLSKHEAAMRRERAMAYSFTHQQTWKNGSKSMNPLFMDMNNLTWGWSWLERWMAARPWEGRGVTGKEPNNDQSSVKSAHFEGEISKAYARYQLNLDNKQSPKSSQKPNRTSSHLSPSPKPPSTPSPKLKSASPSGSIIAQDDDTRSIVSAQSERNRRHSIAGSLVRDDESLASSPSLPSYMVPTKSARAKTRLQSPLGLEANGTPDKGPIMSTKKRLLYPPSPAKPRRHSGPPRVDTSIITNTKIGAVNGGVI

SEQ ID NO: 925 - DNA, 2163 bp, Gossypium hirsutum
  misc_feature: Ceres CLONE ID no.1886384
  misc_feature: Encodes the peptide sequence at SEQ ID NO. 926
aaacttttattccttccgtaaaggttcttctttgtttaaaactcaatttttattcctaatatctactgttcccccatgattttgcctcttaagatgggaaagaaagggaaatggttgtcctctctaaagaaagccttcttctcagagtccaagggaaagaaaaaccagaaatcaaaagaacaatttttggagaaggtgcatttggatcccactggttctgatgcagccaagttatccccacttcctcagcctgaagaggtgaaattaattgaacctgaagttgagcaaagcaagcagacttaccctgtggcagttgccaattctcctgccgttccagctcaggttgctctacaggccattcgacatcaacttaatacagatgctaggtttgccggaaaatctaaggaggaagtggcggcaatcaaaattcaagcagctttccgagcttaccttgcaaaaagggcattgcgtgctttaagaggactggctaggttgaaatcactgatggaagggcctgccgccagacggcaagcagccggttcccttcggtgcttgcagactctttctcgtatgcagtgtcagattcatgctcggagaaccaggatgatggaagaaaaccaggctcttcagaggcaactcttgcagaaacatgcgaaagagattgtgaacttgcaaatgggtgaagattgggatgacactgtgcggtcaaaggaacaaattgaggcaagcttgttgagcaaacatgaggctgccatgagaagagaaagggccatggcgtactcatttactcatcagcaaacctggaagaatgcttcgagatctatgaatccattgttcatggatccaagcaatccctcatggggatggagctggatggaacggtggatgacagcccggccatgggaggttcgtggtggcatgagagataaagaacatctcgatgaccagtcatccctaaagagtgcacgaagcaacttcggtggagaaatcagcaaagcttatgctcgttatcaactcaatttggataagcaatccacgaaggccaaccaaaagccaagccgaacttcgagcctcctatccccttctactcctaagtcagcatccataccagcccgaaagctgaagtcagcaagcccgaggagtggtgtggctggtttagatgatgaaacaagaagcatagtcagtatgaagtctgacagaaaccggagacacagcatcgcaggctcctcagtgcgtgataatgagagccttgccaactctccatcacttccaagttacatggtaccaactaagtctgcaagagttaagaccagtttgcagagccccttgggaccagaagcaaatggaacacctgagaaggatccaattggatctgctaagaaacggctttcttatccgccttcaccggccaggctaaggcgccactcctgtctgccaaaagtggacggtagcattagcaatacaaaagttgcagtggtgaatggaggggacggttttttcaaataaaaaagagatgaagtcctgatgcacgctaatccagaagaatcggaaaagaagagagaaactttgtatgtttcaaaagttagttaactaacgggattgtcgttgcacccaaaacaccccgttttcattaaagtgttgcatcgttttattaactttgagccctagtattttaaaaaaaatagtagagatctcttcttgctctctctcccttttcttgcggctagggttttgaaacccctcatcgccgttgttgccacggtgccaccacaagcggtggtaagggcggtgcgagctggcctaccctgaggtgtccccgaaggccaagccttcttaacccaaaagttgcgaaagaaaggtcttcccctccttattcggtccgatcccggtgacggaggagagccctccgcgaagaaatcacgagcgattccagtgttgcgcgacgaatggaagaggtggcgtgtggtgcgatgaaacggcgcgcgttggtggccatgctggtggggagcggcggctgaaggcttggtggctagggtttgctgaaaattttgtttgtgttgtgggcttggactattagggtttgtgaattaggtttgggtattgtcttatttgggccattttaatatataaagggactgttaataaacatttggattttcaccc

SEQ ID NO: 926 - protein, 470 aa, Gossypium hirsutum
  misc_feature: Ceres CLONE ID no.1886384
  misc_feature: Bit score of 953.8 for HMM based on sequences of FIGURE 16.
  misc_feature (106)..(126): Pfam Name: IQ Pfam Description: IQ calmodulin-binding motif
  misc_feature: Functional Homolog Of Ceres SEEDLINE ID no. ME24091 at SEQ ID NO. 922
MGKKGKWLSSLKKAFFSESKGKKNQKSKEQFLEKVHLDPTGSDAAKLSPLPQPEEVKLIEPEVEQSKQTYPVAVANSPAVPAQVALQAIRHQLNTDARFAGKSKEEVAAIKIQAAFRAYLAKRALRALRGLARLKSLMEGPAARRQAAGSLRCLQTLSRMQCQIHARRTRMMEENQALQRQLLQKHAKEIVNLQMGEDWDDTVRSKEQIEASLLSKHEAAMRRERAMAYSFTHQQTWKNASRSMNPLFMDPSNPSWGWSWMERWMTARPWEVRGGMRDKEHLDDQSSLKSARSNFGGEISKAYARYQLNLDKQSTKANQKPSRTSSLLSPSTPKSASIPARKLKSASPRSGVAGLDDETRSIVSMKSDRNRRHSIAGSSVRDNESLANSPSLPSYMVPTKSARVKTSLQSPLGPEANGTPEKDPIGSAKKRLSYPPSPARLRRHSCLPKVDGSISNTKVAVVNGGDGFFK

SEQ ID NO: 927 - DNA, 1880 bp, Gossypium hirsutum
  misc_feature: Ceres CLONE ID no.1919901
  misc_feature: Encodes the peptide sequence at SEQ ID NO. 928
aacttttcttagttatcctctgcaaatgccaacctgttcttttattattattttccgccatttttgctctctttcaagcattttttttttgcctagatccacttctctctctttgatttttaattactgcatttttgttttaatacacaataagaacaactaagagatagaatgtgacttatcaatcttttaactgagatctgtgagaatttttctatgtaccaaggaattatttacagatgggaaaaaaaggtggctggctttctattgtgaagaaagctttgagccctgaatccaagaaatctcagcaccaaactccaaagccaaagaaaaaatggttcggaaaaagcaaaaatttgagccctgtgtctgtgcctgaagaaactgaagtgataactgaagatgcaaagctaaaagaagctgaaaacgaacaaagcaaacatgcctactctgtggctcttgccaccgctgtggcggccgaggcagcggtggcagctgctcaggcggctgctgaagttgtccgtctcacttctcagccgcgccatctggggaagtcaaaggaggaaatagctgctatcaggattcaaacagcatttcgtggatatttggctaggagggcactgcgagctttgagagggttggtaaggttgaaatcgttgatcagagggcaatccgtcaaacgccaagcaactacaacgttaagatgcatgcagactctagctcgtctgcagtctgagatttctgcaaggaggattagaatgtcagaagagaaccaggctcttcagcgccagcttcaacagaaatgccagaaagagctcgagaagttgagagctcccatgagagaagactggaacgatagtacacagtcgaaggagcagatcgaagcaagacaacaaaataagcaaggagctactatgaaaagggaaagagcattggcttatgcatactgtcaccagcgatcgtggaagaactgttctagatcagtgaatcaaacatttatggatccgagtaattcacactggggttggagttggttagagcgatggatggcagcccgaccatgggaagtccaaagcacaactgataacaatgaccgtggctcagtcaagagtatgggtgcttgttcgatatctataagtgaaatcagcagagcttattctcgaagagatcttaacaatgataacaaaccatctccaacacctcagaagtcaagtcgagttcctagccgccagtctccatcgactccaccttcaaaggcaccttcgatttcatcggtttctggtaaaacaagactgccaagtccgagaggaagtcaatggggagggtatgaagactcaaggagcatactcagtacccggtctgatcgttataggagacatagcattgcagggtcctcaatgagagacgatgagagccttacaagctcacctgcagttccaagttatatggcaccaacacagtccacaaaggccaggtcccacataccaagccccttaggaagtggcacaccagataggagagtggcagggtctgcaaagaaacggcttttgttcccagcatccccagccagtagtaggagacattcagagcctcctaaagtggacataagtgaggctagaaagaatcagcatgcaccaagcaatggaaggcaagtggcttggtgaagagtgcaacaaaagttagattgaataaacatggaagggttatttcaacttgaagttcttgtagtgtggttgtgattatctttttcttcctaggttttatgattattaattataaaagggttacttttttctgggtgagatttagtttattgtttgtggttgacaaacattcttaaaaatcttcaagtttagtttcaattcatgaaatttgtaatt

SEQ ID NO: 928 - protein, 474 aa, Gossypium hirsutum
  misc_feature: Ceres CLONE ID no.1919901
  misc_feature: Bit score of 762.7 for HMM based on sequences of FIGURE 16.
  misc_feature (109)..(129): Pfam Name: IQ Pfam Description: IQ calmodulin-binding motif
  misc_feature: Functional Homolog Of Ceres SEEDLINE ID no. ME24091 at SEQ ID NO. 922
MGKKGGWLSIVKKALSPESKKSQHQTPKPKKKWFGKSKNLSPVSVPEETEVITEDAKLKEAENEQSKHAYSVALATAVAAEAAVAAAQAAAEVVRLTSQPRHLGKSKEEIAAIRIQTAFRGYLARRALRALRGLVRLKSLIRGQSVKRQATTTLRCMQTLARLQSEISARRIRMSEENQALQRQLQQKCQKELEKLRAPMREDWNDSTQSKEQIEARQQNKQGATMKRERALAYAYCHQRSWKNCSRSVNQTFMDPSNSHWGWSWLERWMAARPWEVQSTTDNNDRGSVKSMGACSISISEISRAYSRRDLNNDNKPSPTPQKSSRVPSRQSPSTPPSKAPSISSVSGKTRLPSPRGSQWGGYEDSRSILSTRSDRYRRHSIAGSSMRDDESLTSSPAVPSYMAPTQSTKARSHIPSPLGSGTPDRRVAGSAKKRLLFPASPASSRRHSEPPKVDISEARKNQHAPSNGRQVAW

SEQ ID NO: 929 - DNA, 1475 bp, Gossypium hirsutum
  misc_feature: Ceres CLONE ID no.1829581
  misc_feature: Encodes the peptide sequence at SEQ ID NO. 930
attattttcaatgcaatttaagagttttatttattttatgttataaattttttaacctctaaatatgatttgaaatgttaattccattggttgtttttggttttgaaggagaatttattgaggaatgggcaaaaaaggaagctggtttactgctgtgaagaaagttctaagccttgaacccaacaaagaagagaagattcaaaaatccaagaaaaatggggttaaattacctgagaagatcaaaggaagcaaacgtgacaactggttcgctccggccaccaccatggtgaccggcgcgttggttcgccttactttgtcgccacactacttgggaaaatcaatggaggaaatagctactgttaagattcaaactgtgtttcgaggatacctggcgaggaaggcattgcgagatttgagagggttagagaggttgaaatcattgatacaagggcaatccatgaaacgacaagccactattacgttacgatgcatgcggacacttgctcgagtgcagtcccaaactcgaacaaggcaactcagagtgtctgaacaaaaccgagcacttcaaaagcatcttcaaactaaatacgaaaaacagttgcaaaattccaaatcttacatgggagaagattggaatgtaagtactaagtctaaagagcaaatgcaagcaaaacaacaatatagacaagtagcagccatgcgaagggagagagctttagcttactcatttactcatcagcgatcctggaaggtcacttgtagatcgatgaatcacacatctatggatccatttaatcctaaatggagctggagttggttagagcgatggatgtcaactcgaccatgggagattcaaaatgcaccggataacaatgatcatggcccaagtaagagtgttggtgctgagataaccaaagctaagtctcaaagtgatgttaacaatgatcacaataaacaatcttcaacaccggcaaaaccgattcgacctccgaaccgtaggtcctcttcgactccaccgtctaaaacgcattctatttctagcaagaagggattggaaagccccagtccgacacgaattcagttgcctgattgttacaagaggcatagcatcggaggcttatcattggagagagacgatgaggtctttgcaaactcaccacctaataataaaataccggcacgttcgtcatcaaaggaccggtctcgaccaccgagcattaatagaaatccagttaatactaggagacattctggtcctccgaaagttgatattttttccaactaaggaagaaatgccaaacaatgacaaaggcaggtagtttatgaagcatagacactttagtcgcgagtgccggccacatgtttaatattgaaatggctccgacacaatcaaatgtgtgttggttatatgacgatatattttttcaaaaaatcaaatactatcagaaaaaaatataaagaaagattaattggat

SEQ ID NO: 930 - protein, 386 aa, Gossypium hirsutum
  misc_feature: Ceres CLONE ID no.1829581
  misc_feature: Bit score of 300.2 for HMM based on sequences of FIGURE 16.
  misc_feature (75)..(95): Pfam Name: IQ Pfam Description: IQ calmodulin-binding motif
  misc_feature: Functional Homolog Of Ceres SEEDLINE ID no. ME24091 at SEQ ID NO. 922
MGKKGSWFTAVKKVLSLEPNKEEKIQKSKKNGVKLPEKIKGSKRDNWFAPATTMVTGALVRLTLSPHYLGKSMEEIATVKIQTVFRGYLARKALRDLRGLERLKSLIQGQSMKRQATITLRCMRTLARVQSQTRTRQLRVSEQNRALQKHLQTKYEKQLQNSKSYMGEDWNVSTKSKEQMQAKQQYRQVAAMRRERALAYSFTHQRSWKVTCRSMNHTSMDPFNPKWSWSWLERWMSTRPWEIQNAPDNNDHGPSKSVGAEITKAKSQSDVNNDHNKQSSTPAKPIRPPNRRSSSTPPSKTHSISSKKGLESPSPTRIQLPDCYKRHSIGGLSLERDDEVFANSPPNNKIPARSSSKDRSRPPSINRNPVNTRRHSGPPKVDIFSN

SEQ ID NO: 931 - DNA, 1993 bp, Gossypium hirsutum
  misc_feature: Ceres CLONE ID no.1924993
  misc_feature: Encodes the peptide sequence at SEQ ID NO. 932
gagagagaaaaaaattgaaaaaaaattgaaaaaaaattgaaaaaaaatctagagagagagtataagaggtcttaagtagagtgaagaactgaggtcttaaggtcgactgaggtttgactttgctgattgatttttgattgattgttgatagatcataatcaatcaatcggttggaaaaggaatgtgagaatgagaagcttgctggagaattcatgggtgcttaactcttcattaacaaagtgactcttataaagtatcctagttccttgatttcgaagccaagattgaaaggtccgcccatattaagttgatttgtcattgttggtgccatgggtgtctcaggaaaatggatcaaagcactagtgggcttgaagaaatcagaaaagtctcaatcttcagagaaagtagaaaatagagcaactggtagcaaatttcgtcaccgaagaaagcattcggttgagtttgatacaaatgaacttcaagaagagttggatgagaatgctgcttcactagctgaaaatgctacttgtgcaactatagatgctgctggctgtccttctgatgcacttgaagtgcatgatgcacctcttaatgaacatgcaagggaagaatgggctgccacgaggatacaaactgctttccgaggatttctggccagaagagcactgcgagcattaaaaggattggtaagactgcaggcccttgtcaggggtcatgctgtaagaaaacaagctgctataactcttcgctgcatgcaagctttggttagagttcaggctcgtgtaagagcaaggcgtgttcggctggcattagaaaatcaaactgcacaacagaaacttcagcaacaacttgcaaatgaggcacacgttaaagaaatagaggaagggtggtgtgatagtataggatccgttgaagaaattcaagcaaagttactgaaaaggcaggaagctgcagctaaacgtgagagagccatggcatatgctctggctcatcagtggcaagcaggatcaagacagcagtcagtgcctgctggatttgaaccagataaaagcagctggggttggaactggttggagagatggatggctgtacgtccatgggagaatcgtttccttgacattaatcttcgagatggagtaaagatacgcgaggatagtcctgctgagggaaagaatgatgccagttctcagataaaacctgctatcgggaaaccagctgcatcaagtcttcatgctaacctttcaaataaaaaaacaggtccatcccactttgatgggagcgattccccacctggtaagtctgcatgtgtgcttgaagcagtgaatgcgccatcttccaagccaaaatccaaaccaaatcgtgaagattctgttgaagaagctggctcaggacctgttattagttcaagatctcatagcaatcctaaagagaggcggacacagtctgataaactggccaagaggcgattgtctatgccaaacactggtggggttattgtgtcccaaacaactaagctgagcaaaactgctgcaaaaccgaaccctggcccccacaaacctataagggataggtccaagttaaacggacgagactcaaatcccacaaaacctgtagcaaaggctgttgatctgtaaggaagtatttgtgaagacaagcctgttcgggctgccatccatcctgttgctttagtatgtatatatcaaattacagttggttcgacatgttataaaggcattgtttgttctcctgtcatataatcaaggattggctttgccgtggtgggagtagttactccgtggcatattcaaggagactggttcggtggcttgttacgagaaaaacattggtgagatttaatcagcttgtgtttaatgtttgtcaattatgtgatcacattgtatttattttcaagtgtatgatttccatagaagatgccctttgaattgctcttttttgagtttttttattaaacctcttggctcggttgctgctg

SEQ ID NO: 932 - protein, 367 aa, Gossypium hirsutum
  misc_feature: Ceres CLONE ID no.1924993
  misc_feature: Bit score of 63.4 for HMM based on sequences of FIGURE 16.
  misc_feature (94)..(114): Pfam Name: IQ Pfam Description: IQ calmodulin-binding motif
  misc_feature: Functional Homolog Of Ceres SEEDLINE ID no. ME24091 at SEQ ID NO. 922
MGVSGKWIKALVGLKKSEKSQSSEKVENRATGSKFRHRRKHSVEFDTNELQEELDENAASLAENATCATIDAAGCPSDALEVHDAPLNEHAREEWAATRIQTAFRGFLARRALRALKGLVRLQALVRGHAVRKQAAITLRCMQALVRVQARVRARRVRLALENQTAQQKLQQQLANEAHVKEIEEGWCDSIGSVEEIQAKLLKRQEAAAKRERAMAYALAHQWQAGSRQQSVPAGFEPDKSSWGWNWLERWMAVRPWENRFLDINLRDGVKIREDSPAEGKNDASSQIKPAIGKPAASSLHANLSNKKTGPSHFDGSDSPPGKSACVLEAVNAPSSKPKSKPNREDSVEEAGSGPVISSRSHSNPKE

SEQ ID NO: 933 - DNA, 2002 bp, Gossypium hirsutum
  misc_feature: Ceres CLONE ID no.1883742
  misc_feature: Encodes the peptide sequence at SEQ ID NO. 934
gctgacatctctcttttttcgggttcgggtcgttcttacctgcatttccatcatgtttcatggttgagaacttgaattctttgtcttaaaaggtttatgattgtgtgttgtgtgtatacatatcgacggtatcgatatatttcgggtgcattgaatttggccctgcagagttttcgttcttcggtttcagtaatgctggcagtatgggaaagaaaggaagttggttttctgcaatcaaaagagttttcgtatcgaattcgaaggggaagctagatattgaatcggacaaaaagggcggtaaagaaaggaagaagaaaggtcaagcaaattacaagcatggagaagctaattccttcattcccctgtttagggaaccgagtagtatcgagaaaattctcggggaggctgaaagagatcggaaactatcgttccggccttcaacaccaccggatcaacttagaacaccacctttcatgcttcctagggctgcgtctcctcgtgttcgttctcaaaggattgcctcaccaagggctgcttctccgaagactgcttcttctccacgagccaattcacctagagctgcttctccgtttctgcctccacctccaagagctgcttctccgagagcaggacctcctaggcttgttcgtcctagactggaaccaacgttaaggaaccatcatgcttcagctacaaagattcaagcagcctatcggggttacatggcaaggagaagttttagagctttgaaaggcctcgtaaggcttcaaggagttgtgagaggtcacaatgtgaaacgtcaaactattacggccatgaaatatatgcagcttttggttcgagttcagtctcagattcagtcacgccggatccaaatgttagaaaatcaagcacgacgtcaagctcagtttaagaacgacaaggaggccgacatcggcaaattgacctttggccagtccgagacagggaatgaaaactgggatgatagcttgctgacaaaggaagaaatcgaggcaagaatgcagagaaaggtggaggcagtcatcaaaagagaaagggccatggcgtatgcatattctcaccagctatggaaagatgcaatgaaatcacctcacacaggtgtacccaacattcggtctggtgtattcccatggtggtggaactggttagaacgtcgattaccaccaaccgatttacccgaaaaccaagccacaaagaccttccaatttacaccaaggccaaactccgaattaaagcctagtccgaggccacaatccagtcagttcacattcgacaacatcattgacatccctacaccgaaatcgacaaggtccaccattctccccaccacaaggccaatgcaaacaccaacacctccaagtaaacttgtgccgcaagcaacaaactcagggttattaaactcaaagcattcacgaccccgacctaccataatcgattcaccatcaaacttaccactcaaagacgacgacagcctcacgagttgcccaccgttttcggtcccaaactacatgacaccaacagtttcagctaaagccaaagcgagagccaatggcaacatgaaagagaggttcatggggacacctgggaacgaatcgaagaggcgactttcattcccgttaacgcaagggatagtcggatcgttcaaatggagtaaagggtcgtcgttgttttcgggcaaggattcaaggtcacaaagggggttagataagcatcaaacattgcaatcgttggggaatttgagtgtggattctactgtttctatgcctgctacgatgggaagaaagccatttaatagatttgtgtgatttgttgttcaatttgggtatttttttaaaattgagtgaatgatgatatgttgaattcataaaattttctcatgtaaaataaaaaagaacagaaactaaaggaaaatggtgctttgaatgttgaagactttaggggtatggagagatattatagtaaattttctttattttttatt

SEQ ID NO: 934 - protein, 540 aa, Gossypium hirsutum
  misc_feature: Ceres CLONE ID no.1883742
  misc_feature: Bit score of 62.1 for HMM based on sequences of FIGURE 16.
  misc_feature (160)..(180): Pfam Name: IQ Pfam Description: IQ calmodulin-binding motif
  misc_feature: Functional Homolog Of Ceres SEEDLINE ID no. ME24091 at SEQ ID NO. 922
MGKKGSWFSAIKRVFVSNSKGKLDIESDKKGGKERKKKGQANYKHGEANSFIPLFREPSSIEKILGEAERDRKLSFRPSTPPDQLRTPPFMLPRAASPRVRSQRIASPRAASPKTASSPRANSPRAASPFLPPPPRAASPRAGPPRLVRPRLEPTLRNHHASATKIQAAYRGYMARRSFRALKGLVRLQGVVRGHNVKRQTITAMKYMQLLVRVQSQIQSRRIQMLENQARRQAQFKNDKEADIGKLTFGQSETGNENWDDSLLTKEEIEARMQRKVEAVIKRERAMAYAYSHQLWKDAMKSPHTGVPNIRSGVFPWWWNWLERRLPPTDLPENQATKTFQFTPRPNSELKPSPRPQSSQFTFDNIIDIPTPKSTRSTILPTTRPMQTPTPPSKLVPQATNSGLLNSKHSRPRPTIIDSPSNLPLKDDDSLTSCPPFSVPNYMTPTVSAKAKARANGNMKERFMGTPGNESKRRLSFPLTQGIVGSFKWSKGSSLFSGKDSRSQRGLDKHQTLQSLGNLSVDSTVSMPATMGRKPFNRFV

SEQ ID NO: 935 - DNA, 1837 bp, Gossypium hirsutum
  misc_feature: Ceres CLONE ID no.1884797
  misc_feature: Encodes the peptide sequence at SEQ ID NO. 936
aagaaaggtgagggaggctagaaaagaagagcgacttctttttgtaagatcgacggtatcgatatatttcgggtgcattcgattaggccctgcagagttttcgttcttcggtttcagtaatgctggcagtatgggaaagaaaggaagttggttttctgcaatcaaaagagttttcgtatcgaattcgaaggagaaactaaatattgaatcggataaaaagggcggtaaagaaaggaagaagaaaggtcaagcaaattacaagcatggagaagctaattccttcattcccctgtttagggaaccgagtagtatcgagaaaattcttggggaggctgaaagagatcggaaactatcgttccggccttcaacaccaccggatcaacttagaacaccacctttcatgcttcctagagctgcgtctcctcgtgttcgttctcaaaggattgcctctccaagggctgcttctccgaagactgcttcttctccacgagccaattcacctagagctgcttctccgtttctgcctccacctccaagagctgcttctccgagagcaggacctcctaggcttgttcgtcctagactggaaccaacgttaagaaaccatcatgcttcagctacaaagattcaagcagcctatcggggttacatggcaaggagaagttttagagctttgaaaggcctcgtaaggcttcaaggagttgtgagaggtcacaatgtgaaacgtcaaactattacggccatgaaatatatgcagcttttggtccgagttcagtctcagattcagtcacgccggatccaaatgttagaaaatcaagcacgacgtcaagctcagtttaagaaagacaaggaggccgagagcggcttcggcaaatggacctttggccagtccgagacagggaatgaaaactgggatgatagcttgctgacaaaggaagaaatggaggcaagaatgcagagaaaggtggaggcagtcatcaaaagagaaagggccatggcgtatgcatattctcaccagctatggaaagatgcaatgaaatcacctcacacaggtgtacccaacattcggtccggtgtattcccatggtggtggaactggttagaacgtcgattaccaccaaccgatttacccgaaaaccaagccacaaagaccttccaatttacaccaacaatgccaaactccgaattaaagcctagtccgaggccacaatccagtcagttcacattcgacaacatcattgacatccctacaccgaaatcgacaaggtccaccattctccccaccacaaggccaatgcaaacaccaacaccaccgagtaaacttgtgccgcaagcaaccaactcagggttattaaactcaaagcattcacgaccccgacctaccataatcgattcaccatcgaacttaccactcaaagatgacgacagcctcacaagttgcccaccgttttcggtcccgaactacatgacaccaacagtttcagctaaagccaaagcgagagccaatggcaacatgaaagagaggttcatggggacacctgggaacgaatcgaagaggcgactttcattcccattaacgcaagggatagtcggatcgttaaaatggagtaaagggtcgtcgttgttttcgggcaaggattcaaggtcacaaagggggttagataagcatcaaacattgcaatcgttggggaatttgagtgtggattctactgtttctatgcctgctacgatgggaagaaagccatttaatagatttgtgtgatttgttgttcaatttggttatttttttaaaattgagtgaatgatgatatgttgaatttataaaattttctcatgt

SEQ ID NO: 936 - protein, 543 aa, Gossypium hirsutum
  misc_feature: Ceres CLONE ID no.1884797
  misc_feature: Bit score of 61.0 for HMM based on sequences of FIGURE 16.
  misc_feature (160)..(180): Pfam Name: IQ Pfam Description: IQ calmodulin-binding motif
  misc_feature: Functional Homolog Of Ceres SEEDLINE ID no. ME24091 at SEQ ID NO. 922
MGKKGSWFSAIKRVFVSNSKEKLNIESDKKGGKERKKKGQANYKHGEANSFIPLFREPSSIEKILGEAERDRKLSFRPSTPPDQLRTPPFMLPRAASPRVRSQRIASPRAASPKTASSPRANSPRAASPFLPPPPRAASPRAGPPRLVRPRLEPTLRNHHASATKIQAAYRGYMARRSFRALKGLVRLQGVVRGHNVKRQTITAMKYMQLLVRVQSQIQSRRIQMLENQARRQAQFKKDKEAESGFGKWTFGQSETGNENWDDSLLTKEEMEARMQRKVEAVIKRERAMAYAYSHQLWKDAMKSPHTGVPNIRSGVFPWWWNWLERRLPPTDLPENQATKTFQFTPTMPNSELKPSPRPQSSQFTFDNIIDIPTPKSTRSTILPTTRPMQTPTPPSKLVPQATNSGLLNSKHSRPRPTIIDSPSNLPLKDDDSLTSCPPFSVPNYMTPTVSAKAKARANGNMKERFMGTPGNESKRRLSFPLTQGIVGSLKWSKGSSLFSGKDSRSQRGLDKHQTLQSLGNLSVDSTVSMPATMGRKPFNRFV

SEQ ID NO: 937 - DNA, 2213 bp, Gossypium hirsutum
  misc_feature: Ceres CLONE ID no.1884543
  misc_feature: Encodes the peptide sequence at SEQ ID NO. 938
atgttggttagtactaccgttacaaatttggaatcgagaggagacacacgtcccgtgattacctctcgtcgttgacacgtctgacaacgactaaaccaagagcaacgaaacggcaccgttcctttaccgtttaagtgtttttaacccactcccactcccactcccactcccacacgaccctccctcggcgtgcttcagccgattccggtcctcacaaattctagagaattttttttttaaaaccccacctgagagtcccatttcttctttatgttgatcccttttgtgaaatttgactttttttgtagggaagaaaaaataagaattttgactgaggattgacttatttgactgattgatcgattggtagatcatcataaatcgaaaggtttaaaaagggggtgcttgaagtgagaaggttgatgggaaatttatggttgctttacttagaattaaccaattgatagtcttttaaagtaaccgaggtccttcttcttcaacccaagattgaaacttgaaaggtctgctttatctaattcagttgtcattgttggtaccatgggtgtctcaggaaaatggatcaaagcattggttggcttgaaaagaacagacaagtcacaatcctcggagaagaaagaaaatagggcagctactagcaaatttcgtcaccgaaggaagcattccattgagttttacacagataaacttcaagaagagttggatcagaatgctgcttcaccagccagagatgctaatactcatgcaattgcagatgctgctggcttcccctctggttcacttgaagtgcgtgatgtagctcttaatgaacttgtaatggaagaatgggctgccacaaggatacaaacagctttccgtgggtttctggctagaagagcactccgagccttaaaaggattggtcagactgcaggccctggtgaggggtcatgctgtaagaaaacaagctgcaatgacccttcgctgcatgcaagctttggtgagagttcaggctcgcgtaagagcaaggcgtgttcgactgacattagaaagtgaaactgcccaacagaaacttcagcaacaacttgcagatgaggctcgcgttaaagaaatagaggaagggtggtgcgatagtataggatctgttgaagaaatccaagccaagttactaaagaggcaggaggctgcagctaaacgtgagagagccatggcttatgctctggctcatcagtggcaagcaggatcaagacaacagtctgtgcctgctggatttgaaccagataaaagcagctggggttggaactggctggagagatggatggctgtacgtccatgggagaatcgttttctcgacattaatcttcggaatggagcagtggcctgtgaggatggttctgcagaggggaagaatggtgccaattctcagataaaacctgctaccaagaagccagctgcatcaaatcttcatgctaacctgtcaaatctaaaagtaggtccatcatattcagaagggagtgattctccacctggtaagtcagcaaatgtggtagatgcggtcaatgcattatcttccaagccaaaatccaaaccaatcattgaagatttgggtgaagaagctggctcaaaacctgtttttacttcaagatctcgcagcaatcctaaggagaggtccataaaatcagataaactggtgaaaaagagattgtctctacctaacagtggtgaaggaaccggatctcaaaccagcaagccaggcaaaactgctgcaaaagtgacaccgggctctaacaaggcaataaaggacaggtccaagtccaacggatgtggggactcaaatcctacaaaaaatatggcacaggccgttgatctgtaaggaagtatttgtgatgacaaacctgttggggctgccatccacccgggtcttgttatagtgtgtatatactatattatatatatattgaattacagcacgagatgttatggctttattttcttgtcataaaattgctccatctccgtggtagagttgagattggtttggcttggcttgatttgtcatgggaataagccaataaggtcagtagatttcatgtgttaatgttgtaatcagttgtgattaaatgttacggaatgtttaagccatccttcttagaggttcacaagtaaaaagtttagtgattttttattttctaaaatattaataaaagtgactgatct

SEQ ID NO: 938 - protein, 436 aa, Gossypium hirsutum
  misc_feature: Ceres CLONE ID no.1884543
  misc_feature: Bit score of 90.9 for HMM based on sequences of FIGURE 16.
  misc_feature (95)..(115): Pfam Name: IQ Pfam Description: IQ calmodulin-binding motif
  misc_feature: Functional Homolog Of Ceres SEEDLINE ID no. ME24091 at SEQ ID NO. 922
MGVSGKWIKALVGLKRTDKSQSSEKKENRAATSKFRHRRKHSIEFYTDKLQEELDQNAASPARDANTHAIADAAGFPSGSLEVRDVALNELVMEEWAATRIQTAFRGFLARRALRALKGLVRLQALVRGHAVRKQAAMTLRCMQALVRVQARVRARRVRLTLESETAQQKLQQQLADEARVKEIEEGWCDSIGSVEEIQAKLLKRQEAAAKRERAMAYALAHQWQAGSRQQSVPAGFEPDKSSWGWNWLERWMAVRPWENRFLDINLRNGAVACEDGSAEGKNGANSQIKPATKKPAASNLHANLSNLKVGPSYSEGSDSPPGKSANVVDAVNALSSKPKSKPIIEDLGEEAGSKPVFTSRSRSNPKERSIKSDKLVKKRLSLPNSGEGTGSQTSKPGKTAAKVTPGSNKAIKDRSKSNGCGDSNPTKNMAQAVDL

SEQ ID NO: 939 - DNA, 1957 bp, Gossypium hirsutum
  misc_feature: Ceres CLONE ID no.1834034
  misc_feature: Encodes the peptide sequence at SEQ ID NO. 940
aaggcttgagactcggtcaagcggaggtatccatggttgcgaatctcagacagaaactcaaaaaatattcgtgtttctccttgaaggtcaaacctatcagaccagacagatagttcacactcgaagcatgtctgggttcttgcagaatttggaagtttgaagctctctcttaaagataggaccgtcgttttggcccttgcacgagtggatttttgctggctttttttggttattctgtttcttcacatgcttagaccaacaaagtaatgctggcagtatgggaaagaaaggaagttggttttctgcaattaaaagggttttcataccacactccaaggaaaagctaagtaatgaatcggataaacgaagtggtaaagaaaagaagaagaaaggcctaggaaaattaaggcatggagaaaccaattcctttattcccctctttagagagcccagcagtattgagaaaattcttggggaggctgaaagagagcataaactagtattcaggcctccaacacctccagagcagccagcgacaccaccttttgtgcctcataaagatgcttctcctagagttccttcacagaggattgcctctcctaggattgcttccccgagggctgcttctccaagaaccgtttcccctccacgagctgcttctccaagagctgctccacctaaggtcgtccgtcctcgaccagaaccaactttaaggaatcatcatgcttctgctacaaaaattcaagcagcctataggggttatatggcgaggagaagttttcgagcttggaaaggccttgtgaggcttcaaggagttgttagaggtcaaaacgtgaaacgtcaaacttcaaccgcaatgaaacgtatgcagcttttggtgcgaatacagtcccagattcagtcacgcaggatccagatgttagaaaaccaagcacgacaagaggttcattttaagaatgataaagaagtggagagtaccttgggtaaattggccttcagtcaggcatctgagacaggcaatgaagactgggatgatagtgtgctaccaaaagaagaaatcgaggcaagaatgcagaggaaggtagaggcagtcatcaaaagagaaagagccatggcctatgcatattcccaccagctatggaaaactactccaaaaacagttcacgcagacattcgcactcgtggatttccttggtggtggaactggttagaacgtcagctatcttctagcaacactcctgaaagccaaggcattaagaatttccagcttacaccaccaaggtcaaattccgaattgaagcctagtccagaaccgccattgagcagcaagcaacatcaatttatgtttgacaatatggacactccgacaccgaaatctacaagatcaacaacgcgacctatgcaaactccacctagtagaatcctacaaggaagcagttcaggattgtccaaatattcaagaccgagagctagtggagcggattcgccattcgacttgcccttgaaggatgatgacagccttactagctgcccaccattttcagttccaaattacatgacaccaacagtttcagcgaaagccaaagcaagagccaacagcaacctgaaggagatgttcatggggactccaggaagcgagtcatcaaagaggcggctttcattccctttgacacaagggataggatcattcaagtggagcaaagggtctttgtttgcaggcaaggattcaagctctcaaaagggtttagataagaaccaatcgcttcaatctataggtaatttgagtgtggattcagccgtttcaatgcctgctacggttggaagaaagccatttaaccgatttgtgtgatcttctattgttccttattttttaacctttgatttcttcattttggtgtttatctgagtgtatggtgctatgttgagttgcacaatttactggttgtaagataaaaat

SEQ ID NO: 940 - protein, 523 aa, Gossypium hirsutum
  misc_feature: Ceres CLONE ID no.1834034
  misc_feature: Bit score of 95.8 for HMM based on sequences of FIGURE 16.
  misc_feature (149)..(169): Pfam Name: IQ Pfam Description: IQ calmodulin-binding motif
  misc_feature: Functional Homolog Of Ceres SEEDLINE ID no. ME24091 at SEQ ID NO. 922
MGKKGSWFSAIKRVFIPHSKEKLSNESDKRSGKEKKKKGLGKLRHGETNSFIPLFREPSSIEKILGEAEREHKLVFRPPTPPEQPATPPFVPHKDASPRVPSQRIASPRIASPRAASPRTVSPPRAASPRAAPPKVVRPRPEPTLRNHHASATKIQAAYRGYMARRSFRAWKGLVRLQGVVRGQNVKRQTSTAMKRMQLLVRIQSQIQSRRIQMLENQARQEVHFKNDKEVESTLGKLAFSQASETGNEDWDDSVLPKEEIEARMQRKVEAVIKRERAMAYAYSHQLWKTTPKTVHADIRTRGFPWWWNWLERQLSSSNTPESQGIKNFQLTPPRSNSELKPSPEPPLSSKQHQFMFDNMDTPTPKSTRSTTRPMQTPPSRILQGSSSGLSKYSRPRASGADSPFDLPLKDDDSLTSCPPFSVPNYMTPTVSAKAKARANSNLKEMFMGTPGSESSKRRLSFPLTQGIGSFKWSKGSLFAGKDSSSQKGLDKNQSLQSIGNLSVDSAVSMPATVGRKPFNRFV

SEQ ID NO: 941 - DNA, 1872 bp, Gossypium hirsutum
  misc_feature: Ceres CLONE ID no.1919321
  misc_feature: Encodes the peptide sequence at SEQ ID NO. 942
aaaagcaatcggccgatcgcttcgcacgggttttcttctgttacttcctttttttctctctcaaatttactaccactctcttagctctcctctgtttcagtctcttttttatttccataataacatcaccaattttttctcttttcttttttcttttcacttcattttttctcagctttaactaataaagaaaaaaattcaagtaatttataccttatggaatatgatacagagaaaacatgaagagaattcaagccaatcggtaacatttcatcacctacctgttcttctccgtttcagaaactcctgttttttgaccggcgatgggaaagaaagggagtggatggttctcgacggtgaagaaagtgttcaaatcatctcacaaagacttgcctgacaaaaaaagagagaataatgtggagaaatggccaaatgaggccccggatgcagtgtcgtttgaacattttccagcggagagttcaccggacatcacgaataatgagagtgcaatgtcgactcctctgaatgaagataggaaccatgccattgctgtcgccatggcaactgctgctgctgcagaagcagctgttgcggcagctcaagctgccgctaaagtcgtccggttggcgggttatggacgacagtctaaggaagaaagagctgcaacgcttatacagtcgtattatagaggctatctggctcggagagctttgcgtgctttgaagggactggtgaggttgcaggcactagtgagaggttataacgtgcgcaaacaagcgcaaatgacaatgcggtgcatgcaagcattagtccgggtgcaggcaagagttcaagctcgtaggctgcagctaactgatcatgataagatccccaagagatcagacgaggactatgaagaaaaaaaaggaacgggagaagtagaacgaaagccaaggagcctgttgaagagatatgacagttgggatggtggacagcaaagctcggagaaggttaaggaaagtgtttcgaagaaacatgatgctgcgatgagacgagaacgagcccttgcttatgcctatagctatcagcaacagccacagcaacaactcatgcaaccgcaccccaatggcaaagatgttggagtccaccttaatgatcgcgagaaggcacaatggggttggaactggctcgagcattggatgtcatcgcaaccgtacgacgctcgtcaactaggccatcaagaaggttcttacatgacactgctgaccaccaccgcaaccactaccgttaccgataacatgtctgagaaaactgttgaaatggatgttgtgacagcaatggattcaggctcatactcaaccctgcagcaggctcaatcagggtcaagtaatgtacctagctacatggccccaacccaatctgccaaagccaaggttcgaagccaaggacctatgattatgaagcagcaacgtgtaccacatgcaccccaatggaacccatcaacaaaaaaatccccaggttgtgattcatcaagttcaggtggaggaacaacagtctaccaggcaccaaggagccctggccaaaagagtaacggtgctcgcataccgtctaggcgtctaggtggatgtagcccggataccgctggtggccacggtggagaagattggaggttgcctattggcagtcatggctggtgaaaatgattttggtttttatatgttgtgtttcagaaaatgccactatgaagtgtgaaatgaaggtttgtttcttcatatgttgctctctgtatttatttgctctcgcattcatgttagtgatgtaataatataaaaactgcaaactctccagtatttgaagctttatctatcacatgataattgtttgttcagttct

SEQ ID NO: 942 - protein, 450 aa, Gossypium hirsutum
  misc_feature: Ceres CLONE ID no.1919321
  misc_feature: Bit score of 53.9 for HMM based on sequences of FIGURE 16.
  misc_feature (111)..(131): Pfam Name: IQ Pfam Description: IQ calmodulin-binding motif
  misc_feature: Functional Homolog Of Ceres SEEDLINE ID no. ME24091 at SEQ ID NO. 922
MGKKGSGWFSTVKKVFKSSHKDLPDKKRENNVEKWPNEAPDAVSFEHFPAESSPDITNNESAMSTPLNEDRNHAIAVAMATAAAAEAAVAAAQAAAKVVRLAGYGRQSKEERAATLIQSYYRGYLARRALRALKGLVRLQALVRGYNVRKQAQMTMRCMQALVRVQARVQARRLQLTDHDKIPKRSDEDYEEKKGTGEVERKPRSLLKRYDSWDGGQQSSEKVKESVSKKHDAAMRRERALAYAYSYQQQPQQQLMQPHPNGKDVGVHLNDREKAQWGWNWLEHWMSSQPYDARQLGHQEGSYMTLLTTTATTTVTDNMSEKTVEMDVVTAMDSGSYSTLQQAQSGSSNVPSYMAPTQSAKAKVRSQGPMIMKQQRVPHAPQWNPSTKKSPGCDSSSSGGGTTVYQAPRSPGQKSNGARIPSRRLGGCSPDTAGGHGGEDWRLPIGSHGW

SEQ ID NO: 943 - DNA, 1437 bp, Populus balsamifera subsp. trichocarpa
  misc_feature: Ceres ANNOT ID no.1528800
  misc_feature: Encodes the peptide sequence at SEQ ID NO. 944
atggggaggaaaggaaaatggttttctagtgtaaagaaagctcttagccctgatcccaaggagaagacagaccagaaatcaaataaatcaaagaagaaatggtttggaaagcaacaactggattcggattccacttctttagaaaatgtcacaatgctgtctcctcctccccaaccagaagaagtgaaattaattgagacaacagatgaagtgaaccagcatactttccctgttccagttgccactgctgcagtacctgagcctgctccgactactgtccaaaccaatattgaggttgttcaactgaccaaggtaaacaaatatgctggcaaatcaaaggaagaagaggcggcaattaagattcaaacaacattcagaggatacatggccagaagagcattgcgggctctgagagggttggcgaggctcaaatttctgatggaagggcctagaataaaaaggcaagcaacacataccctccgctgcatgcagactctagctcgggtgcagtcacagattcacacaaggaggatcagaatgtcagaagagaaccaggccctacagagacaactcctacagaagcatgccaaagagcttgaaaacttgcggattggagaggaatgggatgacagtctacagtcgaaggaacagattgaagctagcctgctaaacaagtttgaggccgctacgagaagggaaagagcactggcttatgctttctctcatcagcaaactttgaagaattcttcacgatctgcaaaccccatgttcatgaatgggaatccttcctggggttggagctggttggaacgatggatggcagcccatccatgggagagccggagcttgatggagaaagaacacaataacgaccactcatctgtaaagagtgccagccgcagcattactggaggagaaataagcaaatcttatgctcgctaccagctcaattctgataaattaactccaagagaaagtgaaaggccaaccaaaaccacgaacctacagtccccatcaactcctaaaaagccagctgcttctacagttgctagaaaattgaagtcagcaagcccaaggagtaacattgggggcattgaagatgactctagaagcatggtcagtgttcaatcagatcgtagtagaaggcatagcattgctggttcatttgtgcgagatgatgagagcctcggaagctctccagcgcttccaagttacatggtacctacacaatctgcaagagcaaagtccagaatacatagcctattgggagcagaaaaggacgggacaccagaaaaggaaaagggttcctctgggcatacaaagaaacggctttcataccctccatcgccagccaaaggaaggaggtattctggccccccaaagttggaaagcagcttcaatgcaagaaatagcgtggctgctggcgagggaatttaa

SEQ ID NO: 944 - protein, 478 aa, Populus balsamifera subsp. trichocarpa
  misc_feature: Ceres ANNOT ID no.1528800
  misc_feature: Bit score of 1243.2 for HMM based on sequences of FIGURE 16.
  misc_feature (115)..(135): Pfam Name: IQ Pfam Description: IQ calmodulin-binding motif
  misc_feature: Functional Homolog Of Ceres SEEDLINE ID no. ME24091 at SEQ ID NO. 922
MGRKGKWFSSVKKALSPDPKEKTDQKSNKSKKKWFGKQQLDSDSTSLENVTMLSPPPQPEEVKLIETTDEVNQHTFPVPVATAAVPEPAPTTVQTNIEVVQLTKVNKYAGKSKEEEAAIKIQTTFRGYMARRALRALRGLARLKFLMEGPRIKRQATHTLRCMQTLARVQSQIHTRRIRMSEENQALQRQLLQKHAKELENLRIGEEWDDSLQSKEQIEASLLNKFEAATRRERALAYAFSHQQTLKNSSRSANPMFMNGNPSWGWSWLERWMAAHPWESRSLMEKEHNNDHSSVKSASRSITGGEISKSYARYQLNSDKLTPRESERPTKTTNLQSPSTPKKPAASTVARKLKSASPRSNIGGIEDDSRSMVSVQSDRSRRHSIAGSFVRDDESLGSSPALPSYMVPTQSARAKSRIHSLLGAEKDGTPEKEKGSSGHTKKRLSYPPSPAKGRRYSGPPKLESSFNARNSVAAGEGI

SEQ ID NO: 945 - DNA, 1440 bp, Populus balsamifera subsp. trichocarpa
  misc_feature: Ceres ANNOT ID no.1484880
  misc_feature: Encodes the peptide sequence at SEQ ID NO. 946
atggggaggaaaggaaaatggttttctagtgtaaagaaagctcttagccctgattccaaggagaagaaagaccagaaatcaaataaatcgaagaagaaatggtttggcaagcaacaactggattcggattccacttctttagaaaatgttacaatgcgatctcctcctcctcctcaaccagacgaggtgaaattaattgaaaccacaaatgaagagaaccagcatacttactctgttccagttgtcactgctgcagtagctgagcatgctccgattactgttcaaaccaccactgaggtttttcaaccaaccaaggttaataaatatgctggcaaatcaaaggaagaagtggcggcaattaagattcagacagcattccgaggatacatggcaagaagagcattgcgggctctgagagggctgttcaggctcaaatctctgatggaagggcctacgataaaaagacaagcaacccatactctccactgcatgcagactctagctcgggtgcagtcacagatacacacaaggaggattagaatgtcagaagagaaccaggccctacagagacaactcctacatgagcatgcaaaagagtttgaaagcttgcagattggagaggaatgggatgacagtctacagtcaaaggaacagattgaagctaacctgctaaacaagtttgaggcagctgtgagaagggaaagagcactggcttattctttctctcatcagcaagcctggaaaatttcttcacgagctgtaaacccaatgttcatgagtggcaatccatcctggggttggagctggttggaacgatggatggcagcccatccatgggagagccggagcatgacggagaaagaacttaataatgaccactcatctctaaagagtgcgagccgcagcattactggaggggatataagcaaatcttatgctcgctaccagctcaattctgataaactaactccaagagaaagtgaaaggccaaccaaaaccgcgaacctacagttccaatcaactcctaacaagccagctgcttctacagttgctagaaaattgaagtcagccagcccaaggagtggcattgggggcctagatgatgaatctaaaagtgtggtcagtgttcagtcagatcatagtagaaggcatagcattgcaggttcatttgtacgagatgatgagagccttggaagctctccaccacttccaagttacatggtacctacagaatccgcgagagcaaagtccagattacaaaacccattgggggcagagatgaacggagcgcctgaaaaggaaaagggatccttggggtctgccaagaagcggctttcctaccctccctcaccagccaaagcaaggaggtattcaggtcccccgaaattggaaagcagcttaaaagcagaaaacagtgaggctgctggcgagggcatttaa

SEQ ID NO: 946 - protein, 479 aa, Populus balsamifera subsp. trichocarpa
  misc_feature: Ceres ANNOT ID no.1484880
  misc_feature: Bit score of 1129.7 for HMM based on sequences of FIGURE 16.
  misc_feature (116)..(136): Pfam Name: IQ Pfam Description: IQ calmodulin-binding motif
  misc_feature: Functional Homolog Of Ceres SEEDLINE ID no. ME24091 at SEQ ID NO. 922
MGRKGKWFSSVKKALSPDSKEKKDQKSNKSKKKWFGKQQLDSDSTSLENVTMRSPPPPQPDEVKLIETTNEENQHTYSVPVVTAAVAEHAPITVQTTTEVFQPTKVNKYAGKSKEEVAAIKIQTAFRGYMARRALRALRGLFRLKSLMEGPTIKRQATHTLHCMQTLARVQSQIHTRRIRMSEENQALQRQLLHEHAKEFESLQIGEEWDDSLQSKEQIEANLLNKFEAAVRRERALAYSFSHQQAWKISSRAVNPMFMSGNPSWGWSWLERWMAAHPWESRSMTEKELNNDHSSLKSASRSITGGDISKSYARYQLNSDKLTPRESERPTKTANLQFQSTPNKPAASTVARKLKSASPRSGIGGLDDESKSVVSVQSDHSRRHSIAGSFVRDDESLGSSPPLPSYMVPTESARAKSRLQNPLGAEMNGAPEKEKGSLGSAKKRLSYPPSPAKARRYSGPPKLESSLKAENSEAAGEGI

SEQ ID NO: 947 - DNA, 1455 bp, Populus balsamifera subsp. trichocarpa
  misc_feature: Ceres ANNOT ID no.1475350
  misc_feature: Encodes the peptide sequence at SEQ ID NO. 948
atggggaggaaaggaaaatggttttctagtgtaaagaaagctcttagccctgatcccaaggagaagacagaccagaaatcaaataaatcaaagaagaaatggtttggaaagcaacaactggattcggattccacttctttagaaaatgtcacaatgctgtctcctcctccccaaccagaagaagtgaaattaattgagacaacagatgaagtgaaccagcatactttccctgttccagttgccactgctgcagtacctgagcctgctccgactactgtccaaaccaatattgaggttgttcaactgaccaaggtaaacaaatatgctggcaaatcaaaggaagaagaggcggcaattaagattcaaacaacattcagaggatacatggccagaagagcattgcgggctctgagagggttggcgaggctcaaatttctgatggaagggcctagaataaaaaggcaagcaacacataccctccgctgcatgcagactctagctcgggtgcagtcacagattcacacaaggaggatcagaatgtcagaagagaaccaggccctacagagacaactcctacagaagcatgccaaagagcttgaaaacttgcggggcatgcaatgttttcatattggagaggaatgggatgacagtctacagtcgaaggaacagattgaagctagcctgctaaacaagtttgaggccgctacgagaagggaaagagcactggcttatgctttctctcatcagcaaactttgaagaattcttcacgatctgcaaaccccatgttcatgaatgggaatccttcctggggttggagctggttggaacgatggatggcagcccatccatgggagagccggagcttgatggagaaagaacacaataacgaccactcatctgtaaagagtgccagccgcagcattactggaggagaaataagcaaatcttatgctcgctaccagctcaattctgataaattaactccaagagaaagtgaaaggccaaccaaaaccacgaacctacagtccccatcaactcctaaaaagccagctgcttctacagttgctagaaaattgaagtcagcaagcccaaggagtaacattgggggcattgaagatgactctagaagcatggtcagtgttcaatcagatcgtagtagaaggcatagcattgctggttcatttgtgcgagatgatgagagcctcggaagctctccagcgcttccaagttacatggtacctacacaatctgcaagagcaaagtccagaatacatagcctattgggagcagaaaaggacgggacaccagaaaaggaaaagggttcctctgggcatacaaagaaacggctttcataccctccatcgccagccaaaggaaggaggtattctggccccccaaagttggaaagcagcttcaatgcaagaaatagcgtggctgctggcgagggaatttaa

SEQ ID NO: 948 - protein, 484 aa, Populus balsamifera subsp. trichocarpa
  misc_feature: Ceres ANNOT ID no.1475350
  misc_feature: Bit score of 1230.9 for HMM based on sequences of FIGURE 16.
  misc_feature (115)..(135): Pfam Name: IQ Pfam Description: IQ calmodulin-binding motif
  misc_feature: Functional Homolog Of Ceres SEEDLINE ID no. ME24091 at SEQ ID NO. 922
MGRKGKWFSSVKKALSPDPKEKTDQKSNKSKKKWFGKQQLDSDSTSLENVTMLSPPPQPEEVKLIETTDEVNQHTFPVPVATAAVPEPAPTTVQTNIEVVQLTKVNKYAGKSKEEEAAIKIQTTFRGYMARRALRALRGLARLKFLMEGPRIKRQATHTLRCMQTLARVQSQIHTRRIRMSEENQALQRQLLQKHAKELENLRGMQCFHIGEEWDDSLQSKEQIEASLLNKFEAATRRERALAYAFSHQQTLKNSSRSANPMFMNGNPSWGWSWLERWMAAHPWESRSLMEKEHNNDHSSVKSASRSITGGEISKSYARYQLNSDKLTPRESERPTKTTNLQSPSTPKKPAASTVARKLKSASPRSNIGGIEDDSRSMVSVQSDRSRRHSIAGSFVRDDESLGSSPALPSYMVPTQSARAKSRIHSLLGAEKDGTPEKEKGSSGHTKKRLSYPPSPAKGRRYSGPPKLESSFNARNSVAAGEGI

SEQ ID NO: 949 - DNA, 1470 bp, Populus balsamifera subsp. trichocarpa
  misc_feature: Ceres ANNOT ID no.1465047
  misc_feature: Encodes the peptide sequence at SEQ ID NO. 950
atggggaaaagagggagttggttctctgctttgaagaaagccctcggttcctctaagaaatccaaatcaaagaagaaatggtcagaaaaagagaagaaccgggatctaggtgtttcttcacatgaagaaaccgttgcaccctctctttctcctcctcgtacaccacctcctcctacagcagaagatgtgaaattaactgaagctgagaacgagcagagcaagcatgcttattccgtggcgcttgccactgctgtggcagctgaggcagctgttgcagccgcccaggctgccgctgaggttgttcggcttactacagtggcacattactctggaaaatcgaaggaggaaatagctgcaatcaggattcaaacagcatttagaggatacctggcgaggagggcattacgtgctttgagagggctggtgagattgaagtcattgatacaagggcaatctgtcaaacggcaagcaactgccacattacgagccatgcagactcttgctcgtgtgcagtctcagattcgtgcaagaaggatcagaatgtccgaggaaaatgaggccctccaacggcagctccagcagaaacatgacaaagaacttgagaagttgagaacttctattggagaacaatgggatgatagcccacaatcaaaggaagaagttgaagccagcctactacaaaagcaagaagctgccatgagaagagaaagggcactggcttatgcatactcgcatcagcaaatgtggaagcaatcttcaaaatcagcaaatgctacattcatggatccaaacaatcctcgttggggatggagttggttagagaggtggatggcagcccgaccttgggagagccgaagcacaatagataacaatgatcgggcctctgttaagagtacaacaagccgtaccatgtctcttggagaaatcagcagagcttattctcgtcgtgatcttaaccatgacaataaagcttctcctggtgcgcaaaaatcaagtcggcctcccagtcggcaatcaccttctactcccccctctaaggcaccatctacatcttcagtaacagggaaagcaaagccaccaagccctagagggagtgcttggggaggagacgaggactccaggagcacattcagtgtccagtctgagcgctatcggagacatagcatagcagggtcatcaataagagatgatgagagtcttgcaagttcgccttcagttccaagttacatggcacccacacggtcacagtcagcaaaggcaaaatcccgcttgtcaagcccgttaggcatagataataatgggacaccagataaggcatcagtgggttatgtaaagaagcggctttccttctctgcttcaccagctggagcaaggagacactctggtcctcctagggtggatgccagtgctgttaaagacattcaaatgcacagagaagagaaaatgagcaatggagcaagcagcaagtag

SEQ ID NO: 950 - protein, 489 aa, Populus balsamifera subsp. trichocarpa
  misc_feature: Ceres ANNOT ID no.1465047
  misc_feature: Bit score of 853.1 for HMM based on sequences of FIGURE 16.
  misc_feature (116)..(136): Pfam Name: IQ Pfam Description: IQ calmodulin-binding motif
  misc_feature: Functional Homolog Of Ceres SEEDLINE ID no. ME24091 at SEQ ID NO. 922
MGKRGSWFSALKKALGSSKKSKSKKKWSEKEKNRDLGVSSHEETVAPSLSPPRTPPPPTAEDVKLTEAENEQSKHAYSVALATAVAAEAAVAAAQAAAEVVRLTTVAHYSGKSKEEIAAIRIQTAFRGYLARRALRALRGLVRLKSLIQGQSVKRQATATLRAMQTLARVQSQIRARRIRMSEENEALQRQLQQKHDKELEKLRTSIGEQWDDSPQSKEEVEASLLQKQEAAMRRERALAYAYSHQQMWKQSSKSANATFMDPNNPRWGWSWLERWMAARPWESRSTIDNNDRASVKSTTSRTMSLGEISRAYSRRDLNHDNKASPGAQKSSRPPSRQSPSTPPSKAPSTSSVTGKAKPPSPRGSAWGGDEDSRSTFSVQSERYRRHSIAGSSIRDDESLASSPSVPSYMAPTRSQSAKAKSRLSSPLGIDNNGTPDKASVGYVKKRLSFSASPAGARRHSGPPRVDASAVKDIQMHREEKMSNGASSK

SEQ ID NO: 951 - DNA, 1653 bp, Populus balsamifera subsp. trichocarpa
  misc_feature: Ceres ANNOT ID no.1479891
  misc_feature: Encodes the peptide sequence at SEQ ID NO. 952
atgggaaagaaagggagttggttttcagcaatcaagagggtcttttcaccccactccaaggacaaactagctagtcttgggaggattgaaaaaattaagatgaaagttgtccagatgcgtgaggaagcagaacatgaatcagataagagaagcacgaaagaaaagaagaagaagggtcttggaaaactaagacatggagagaccacttcattcattcccctgtttagagaaccaagcagtattgagaaaattttggatgaggctgaaagagagaataaattaattttcaggcctccaacgcctcctgaggaactgacaacaccaccttttgtgcctccaagagccgattctccgagggttgcttctcaaagagtcacctctccaagagctgctactccaagggttgcttcccctagagcggcatctccaagggttgcttcccctagagcagcttctcctaggaatgctcaacgccataaggagatatattacagaccagaaccaactctaagaaaccatcatgcttctgctaccaagatccaagcagcctatagaggctatgttgcaaggaggagcttcagagcactgaagggtcttgtgaggcttcaaggagtgataagaggacagaatgtgaagcggcagacaatgaatgcgatgaaacacatgcagctcttggtgcgggtccagtctcagattcagtctcggaggatccagatgttagaaaaccaagcacgacgtcaagctcaaaacagaaatgataaagaagtggatagtaccttgggcaaatggggccagttgtctgaggcaggtaataacgaagactgggatgacagcgtgctgacgaaggaggaaattgacgcaaggttgcagaaaagggtggaggcagtcgtcaagagagaaagagccatggcttatgcatattcccaccagctgtggaaagccactccaaaatctgctcagtcagctctaatggatatccgttccaatgggtttccatggtggtggaactggttagagcgtcagctacctccaactaatcctcctgaaagccaagccttgaggaattttcaacttacaccaccaaggccacgttccgatatgaaggctagccctaggcccccatccaggagccacaagcaacaacattttgggtttgataatatggatactccaacaccgagatcctcaaaatcaactgtttttgtgccaacgagacaagcgcgaactcctctacatagaactccacaagccaacagccctagcttgtcaaaatattcaatggcaagagccagtgcagcaaattctccttttaacttgccattgaaggatgacgatagcctcatgagctgcccaccattttcagtgccaaactacatgagccctacagtttcagccaaagccaaagaaagagctaatagcaatcccaaggagaggtttccagggaccccaaccagtgaaaagaggagactgtcattccctcttacacagggcattgggtctttcaagtggaacaaaggctccttcactagcaaggattcaagttctcaaaggggtttagataggcatcagtcacttcaatccataggaaacttgagtgtggattcaaccgtctcgatgcctgccacgcgaaagccatttaaccgattcgtgtga

SEQ ID NO: 952 - protein, 550 aa, Populus balsamifera subsp. trichocarpa
  misc_feature: Ceres ANNOT ID no.1479891
  misc_feature: Bit score of 65.2 for HMM based on sequences of FIGURE 16.
  misc_feature (174)..(194): Pfam Name: IQ Pfam Description: IQ calmodulin-binding motif
  misc_feature: Functional Homolog Of Ceres SEEDLINE ID no. ME24091 at SEQ ID NO. 922
MGKKGSWFSAIKRVFSPHSKDKLASLGRIEKIKMKVVQMREEAEHESDKRSTKEKKKKGLGKLRHGETTSFIPLFREPSSIEKILDEAERENKLIFRPPTPPEELTTPPFVPPRADSPRVASQRVTSPRAATPRVASPRAASPRVASPRAASPRNAQRHKEIYYRPEPTLRNHHASATKIQAAYRGYVARRSFRALKGLVRLQGVIRGQNVKRQTMNAMKHMQLLVRVQSQIQSRRIQMLENQARRQAQNRNDKEVDSTLGKWGQLSEAGNNEDWDDSVLTKEEIDARLQKRVEAVVKRERAMAYAYSHQLWKATPKSAQSALMDIRSNGFPWWWNWLERQLPPTNPPESQALRNFQLTPPRPRSDMKASPRPPSRSHKQQHFGFDNMDTPTPRSSKSTVFVPTRQARTPLHRTPQANSPSLSKYSMARASAANSPFNLPLKDDDSLMSCPPFSVPNYMSPTVSAKAKERANSNPKERFPGTPTSEKRRLSFPLTQGIGSFKWNKGSFTSKDSSSQRGLDRHQSLQSIGNLSVDSTVSMPATRKPFNRFV

SEQ ID NO: 953 - DNA, 1587 bp, Populus balsamifera subsp. trichocarpa
  misc_feature: Ceres ANNOT ID no.1534105
  misc_feature: Encodes the peptide sequence at SEQ ID NO. 954
atgggaaagaaagggagttggttttcagcaatcaagagggtctttctaccaaactccaaggacaaactagctaatgaatcagataagagaagcgcaaaagaaaagaagaagaagggtcgtggaaaactaagacatggagagaccacttcattcattcccctgtttagagaaccaagtagtatcgagaaaattttggatgaggctgaaagagagcataaattaattttcaggcctcccacacctcctgagcaaccgactacaccaccctttgtgcctccaagatctgcttctccgagggttgcttctcaaagagtcacctctccaagagctgcttcccctagagctgcatctccaagggttgcttctcctagagcagcttctcctaggaatgctcaacgccataaggagatatattacagaccagaaccaactctaagaaaccatcatgcttcagcaaccaagatccaagcagcctatagaggctatgttgcaaggaggagcttcagagctttgaagggtcttgtgaggcttcaaggagtgataagaggacagaatgtgaagcggcagacgatgaatgcaatgaaatacatgcagctcttggttcgggtccagtctcagattcagtcacggaggatccaaatgttagaaaaccaagcacgacgtcaagctcaaaacaaaaatgataaagaagtggatggtaccttgggcaaatggggccagtcgcctgaggcaggtaatagtgaagactgggatgacagcgttctgacgaaggaggaaattgacgcaaggttgcagagaaaggtggaggcagtcgtcaagagagaaagggccatggcgtattcgtattcccaccagctgtggaaagcctcaccaaaatctgctcagtcatctctcatggatatccgttccaatggatttccatggtggtggaactggttagaacgtcagctacctccaacgaatcctcctgaaagccaagccttgaagaattttcaacttacaccgccaaggccacattcagagataaagcctagcccaagacccccatcaagtagccacaagcaacaacatctggggtttgataatatggatactcccacaccgagatcctcaaaatcaactgcatttgtgtcaacaagaccagcgcgaactcctctacttagaactccacaagcaaacagccctagcttgtcaagatattcaagagcaagagccagtggagggaattctcctttcgacttgccattgaaggatgacgatagcctcacgagctgcccaccattttcagtgccaaactacatgactcctacggcctcagccaaggcaaaaacaagagcttatagtaatcccaaagagaggtttccagggaccccaaacagtgaaaagaggagactctcgttccctcttacacaaggcattggatctttcaagtggaacaaaggctccttcttcaccagcaaggattcaagctctcaaaggggtttagataagcatcagtcacttcaatccataggagatttgagtgtggattcaaccgtctcgatgcctgctacggttggacgaaggccatttaaccgatttgtgtga

SEQ ID NO: 954 - protein, 528 aa, Populus balsamifera subsp. trichocarpa
  misc_feature: Ceres ANNOT ID no.1534105
  misc_feature: Bit score of 88.9 for HMM based on sequences of FIGURE 16.
  misc_feature (149)..(169): Pfam Name: IQ Pfam Description: IQ calmodulin-binding motif
  misc_feature: Functional Homolog Of Ceres SEEDLINE ID no. ME24091 at SEQ ID NO. 922
MGKKGSWFSAIKRVFLPNSKDKLANESDKRSAKEKKKKGRGKLRHGETTSFIPLFREPSSIEKILDEAEREHKLIFRPPTPPEQPTTPPFVPPRSASPRVASQRVTSPRAASPRAASPRVASPRAASPRNAQRHKEIYYRPEPTLRNHHASATKIQAAYRGYVARRSFRALKGLVRLQGVIRGQNVKRQTMNAMKYMQLLVRVQSQIQSRRIQMLENQARRQAQNKNDKEVDGTLGKWGQSPEAGNSEDWDDSVLTKEEIDARLQRKVEAVVKRERAMAYSYSHQLWKASPKSAQSSLMDIRSNGFPWWWNWLERQLPPTNPPESQALKNFQLTPPRPHSEIKPSPRPPSSSHKQQHLGFDNMDTPTPRSSKSTAFVSTRPARTPLLRTPQANSPSLSRYSRARASGGNSPFDLPLKDDDSLTSCPPFSVPNYMTPTASAKAKTRAYSNPKERFPGTPNSEKRRLSFPLTQGIGSFKWNKGSFFTSKDSSSQRGLDKHQSLQSIGDLSVDSTVSMPATVGRRPFNRFV

SEQ ID NO: 955 - DNA, 1593 bp, Populus balsamifera subsp. trichocarpa
  misc_feature: Ceres ANNOT ID no.1533356
  misc_feature: Encodes the peptide sequence at SEQ ID NO. 956
atgggaaagaaagggagttggttttcagcaatcaagagggtcttttcaccccactccaaggacaaactagctagtgaatcagataagagaagcacgaaagaaaagaagaagaagggtcttggaaaactaagacatggagagaccacttcattcattcccctgtttagagaaccaagcagtattgagaaaattttggatgaggctgaaagagagaataaattaattttcaggcctccaacgcctcctgaggaactgacaacaccaccttttgtgcctccaagagccgattctccgagggttgcttctcaaagagtcacctctccaagagctgctactccaagggttgcttcccctagagcggcatctccaagggttgcttcccctagagcagcttctcctaggaatgctcaacgccataaggagatatattacagaccagaaccaactctaagaaaccatcatgcttctgctaccaagatccaagcagcctatagaggctatgttgcaaggaggagcttcagagcactgaagggtcttgtgaggcttcaaggagtgataagaggacagaatgtgaagcggcagacaatgaatgcgatgaaacacatgcagctcttggtgcgggtccagtctcagattcagtctcggaggatccagatgttagaaaaccaagcacgacgtcaagctcaaaacagaaatgataaagaagtggatagtaccttgggcaaatggggccagttgtctgaggcaggtaataacgaagactgggatgacagcgtgctgacgaaggaggaaattgacgcaaggttgcagaaaagggtggaggcagtcgtcaagagagaaagagccatggcttatgcatattcccaccagctgtggaaagccactccaaaatctgctcagtcagctctaatggatatccgttccaatgggtttccatggtggtggaactggttagagcgtcagctacctccaactaatcctcctgaaagccaagccttgaggaattttcaacttacaccaccaaggccacgttccgatatgaaggctagccctaggcccccatccaggagccacaagcaacaacattttgggtttgataatatggatactccaacaccgagatcctcaaaatcaactgtttttgtgccaacgagacaagcgcgaactcctctacatagaactccacaagccaacagccctagcttgtcaaaatattcaatggcaagagccagtgcagcaaattctccttttaacttgccattgaaggatgacgatagcctcatgagctgcccaccattttcagtgccaaactacatgagccctacagtttcagccaaagccaaagaaagagctaatagcaatcccaaggagaggtttccagggaccccaaccagtgaaaagaggagactgtcattccctcttacacagggcattgggtctttcaagtggaacaaaggctccttcactagcaaggattcaagttctcaaaggggtttagataggcatcagtcacttcaatccataggaaacttgagtgtggattcaaccgtctcgatgcctgccacgcgaaagccatttaaccgattcgtgtga

SEQ ID NO: 956 - protein, 530 aa, Populus balsamifera subsp. trichocarpa
  misc_feature: Ceres ANNOT ID no.1533356
  misc_feature: Bit score of 90.2 for HMM based on sequences of FIGURE 16.
  misc_feature (154)..(174): Pfam Name: IQ Pfam Description: IQ calmodulin-binding motif
  misc_feature: Functional Homolog Of Ceres SEEDLINE ID no. ME24091 at SEQ ID NO. 922
MGKKGSWFSAIKRVFSPHSKDKLASESDKRSTKEKKKKGLGKLRHGETTSFIPLFREPSSIEKILDEAERENKLIFRPPTPPEELTTPPFVPPRADSPRVASQRVTSPRAATPRVASPRAASPRVASPRAASPRNAQRHKEIYYRPEPTLRNHHASATKIQAAYRGYVARRSFRALKGLVRLQGVIRGQNVKRQTMNAMKHMQLLVRVQSQIQSRRIQMLENQARRQAQNRNDKEVDSTLGKWGQLSEAGNNEDWDDSVLTKEEIDARLQKRVEAVVKRERAMAYAYSHQLWKATPKSAQSALMDIRSNGFPWWWNWLERQLPPTNPPESQALRNFQLTPPRPRSDMKASPRPPSRSHKQQHFGFDNMDTPTPRSSKSTVFVPTRQARTPLHRTPQANSPSLSKYSMARASAANSPFNLPLKDDDSLMSCPPFSVPNYMSPTVSAKAKERANSNPKERFPGTPTSEKRRLSFPLTQGIGSFKWNKGSFTSKDSSSQRGLDRHQSLQSIGNLSVDSTVSMPATRKPFNRFV

SEQ ID NO: 957 - DNA, 1287 bp, Populus balsamifera subsp. trichocarpa
  misc_feature: Ceres ANNOT ID no.1515314
  misc_feature: Encodes the peptide sequence at SEQ ID NO. 958
atgggtgtctcagggaaatggtttaaagctttggttggtctaaagaagtctgaaaagtcacagtctttggacaaagaggaaaatggggcgactgctagcaagtctcgacataggagaaagcattcggttgagtttgatgctgataaaattcaagaggagtttcataatcataatcataatcataatcataatcataatgatggtgacgccaacattcgttccatcccagatacttctgaatctccttttgattcgcttcaagttcaggatttagctcataatcaacaagttatgagagaagaattggctgccactcgcattcaaacagctttccgcgggtttctggcaagaagagctctgcgagctttgaaaggattagtgagactgcaagctcttgttcggggccatgctgtgagaaaacaagctgcaataactcttcgctgcatgcaagctttggtgagagttcaggctcgagttcgtgcaaggcgtgttcgcttagcattggaaagtcaaacagctcaacagaaacttcagcaacaactagctaatgaggcccgggttcgagaaatagaggaaggatggtgtgatagtgtgggatctgttgaacaaattcaagccaagttgctgaagcggcaggaggctgcagctaagcgtgagagagctattgcatatgctctggcccatcagtggcaggctgggtcaagacaccaggctgttccatctggttttgaaccagataaaagcagttggggctggaactggttggagagatggatggctgttcgcccatgggagaaccgctttcttgacataaatcttagagatggagtgatgattcgtgaggatgaaacagctgctgaggtcaggaatggcagcaaatcccagttaaaaacaactgccaagaaagctattgcctcagatcttcagtcaaccatttcaagtcagaaaaaaggtccatctcattctgatggtggcagttcctcacctagtaagtcagcaggcatgttagaagcacccaacacacttttttctaaaccaaagccaaagccagttcttgaagacctggttgaagaagccatttcaaaacctgctatggctacaagatctcacagcaacccaaaggagagaaccacccaactagataaacaggcaaagaagagattgtctctgcctaacagtggtcagttttctctctcatttttctccttcatgcccacacatttgcacgaaagcacacgtaggttcaaaagtatgcaaggattgccacactgcttgtcacagaaatga

SEQ ID NO: 958 - protein, 428 aa, Populus balsamifera subsp. trichocarpa
  misc_feature: Ceres ANNOT ID no.1515314
  misc_feature: Bit score of 97.2 for HMM based on sequences of FIGURE 16.
  misc_feature (101)..(121): Pfam Name: IQ Pfam Description: IQ calmodulin-binding motif
  misc_feature: Functional Homolog Of Ceres SEEDLINE ID no. ME24091 at SEQ ID NO. 922
MGVSGKWFKALVGLKKSEKSQSLDKEENGATASKSRHRRKHSVEFDADKIQEEFHNHNHNHNHNHNDGDANIRSIPDTSESPFDSLQVQDLAHNQQVMREELAATRIQTAFRGFLARRALRALKGLVRLQALVRGHAVRKQAAITLRCMQALVRVQARVRARRVRLALESQTAQQKLQQQLANEARVREIEEGWCDSVGSVEQIQAKLLKRQEAAAKRERAIAYALAHQWQAGSRHQAVPSGFEPDKSSWGWNWLERWMAVRPWENRFLDINLRDGVMIREDETAAEVRNGSKSQLKTTAKKAIASDLQSTISSQKKGPSHSDGGSSSPSKSAGMLEAPNTLFSKPKPKPVLEDLVEEAISKPAMATRSHSNPKERTTQLDKQAKKRLSLPNSGQFSLSFFSFMPTHLHESTRRFKSMQGLPHCLSQK

SEQ ID NO: 959 - DNA, 1314 bp, Populus balsamifera subsp. trichocarpa
  misc_feature: Ceres ANNOT ID no.1492487
  misc_feature: Encodes the peptide sequence at SEQ ID NO. 960
atgggtgtctcagggaaatggtttaaagcattggttggtttaaagaagtctgaaaagtcacagtctttggacaaggatgaaaataggacgagtgccagcaagtttcggcataggaggaagcattcggttgagtttgatggtgataaatttgaagaggagtttgataatcatgacaatgtagctacagttggtgataccaacgttgtttccgttccagatgcgtcggaatctccttctgcttcacttcaagttcaggatgttgctcataatcaacaagttctgagagaagaatgggctgccactcgcatccagacagcttttcgagggtttttggcaagaagagctcttcgagctttgaaaggattagtgagactgcaagcccttgttcggggccatgctgtgaggaaacaagctgcaataactcttcgctgtatgcaagctttggtgagagttcaggctcgtgtccgtgcaagacgtgttcgcttagcattggagagtcaaacagctcaacataaacttcagcaacaactagctaatgaggctcgcgttcaagaaatagaggaaggatggtgtgatagtgtgggatctgttgaacaaattcaagccaagttgctgaagcggcaggaggctgcagctaagcgtgagagagccatggcatatgctttggcccatcagtggcaggctgggtcgagactgcaggctgctccctctgggtttgaacctgataaaagcagttggggctggaactggttggagagatggatggctgttcgcccatgggaaaaccgctttcttgacataaatctcagagatggagtgatgatttatgaagatgaaacagctgctgaggtcaagaatggcagcaaatcccagctaaaaactactaccaagaaaggagttgcctcaaaccttcaatcaaccatttcaagtcagaaaacaggtccatctcattctgatggtggcagttcctcccctagtaagtcagcaggcatgttagatgtgcccgacactctttttactaaaccaaagccaaagctagttcttgaagacctggttgaagaagccaactcaagacgtgctattgttacaagatctcacagcaacccaaaggagagaactacccaactagataaacaggcaaggaagagattgtctctgcctaacagtggggggggtactggcgctcaggtagccaggcatagcagaaacgctactagaggggcacctagctctcagaagcccatcaaggatagatccaagttaaacgggaaaggagatccaaacaccgcaaagtctgttgcacaggctgtttga

SEQ ID NO: 960 - protein, 437 aa, Populus balsamifera subsp. trichocarpa
  misc_feature: Ceres ANNOT ID no.1492487
  misc_feature: Bit score of 93.4 for HMM based on sequences of FIGURE 16.
  misc_feature (97)..(117): Pfam Name: IQ Pfam Description: IQ calmodulin-binding motif
  misc_feature: Functional Homolog Of Ceres SEEDLINE ID no. ME24091 at SEQ ID NO. 922
MGVSGKWFKALVGLKKSEKSQSLDKDENRTSASKFRHRRKHSVEFDGDKFEEEFDNHDNVATVGDTNVVSVPDASESPSASLQVQDVAHNQQVLREEWAATRIQTAFRGFLARRALRALKGLVRLQALVRGHAVRKQAAITLRCMQALVRVQARVRARRVRLALESQTAQHKLQQQLANEARVQEIEEGWCDSVGSVEQIQAKLLKRQEAAAKRERAMAYALAHQWQAGSRLQAAPSGFEPDKSSWGWNWLERWMAVRPWENRFLDINLRDGVMIYEDETAAEVKNGSKSQLKTTTKKGVASNLQSTISSQKTGPSHSDGGSSSPSKSAGMLDVPDTLFTKPKPKLVLEDLVEEANSRRAIVTRSHSNPKERTTQLDKQARKRLSLPNSGGGTGAQVARHSRNATRGAPSSQKPIKDRSKLNGKGDPNTAKSVAQAV

SEQ ID NO: 961 - DNA, 1512 bp, Populus balsamifera subsp. trichocarpa
  misc_feature: Ceres ANNOT ID no.1439623
  misc_feature: Encodes the peptide sequence at SEQ ID NO. 962
atggataaaaatgaagtttacccaataataatccaccaccccggcgtattttatcctacgctgggcctcactcctcactctcttcctcttcctcgcccgctcatactcttcctcctcctcctcctactttccttctcccttacactcactgacgctcctgattctctacttcccgcgtcttcctatccctccctcccactcagacgaacagggaaatggtttaaagcattggttggtttaaagaagtctgaaaagtcacagtctttggacaaggatgaaaataggacgagtgccagcaagtttcggcataggaggaagcattcggttgagtttgatggtgataaatttgaagaggagtttgataatcatgacaatgtagctacagttggtgataccaacgttgtttccgttccagatgcgtcggaatctccttctgcttcacttcaagttcaggatgttgctcataatcaacaagttctgagagaagaatgggctgccactcgcatccagacagcttttcgagggtttttggcaagaagagctcttcgagctttgaaaggattagtgagactgcaagcccttgttcggggccatgctgtgaggaaacaagctgcaataactcttcgctgtatgcaagctttggtgagagttcaggctcgtgtccgtgcaagacgtgttcgcttagcattggagagtcaaacagctcaacataaacttcagcaacaactagctaatgaggctcgcgttcaagaaatagaggaaggatggtgtgatagtgtgggatctgttgaacaaattcaagccaagttgctgaagcggcaggaggctgcagctaagcgtgagagagccatggcatatgctttggcccatcagtggcaggctgggtcgagactgcaggctgctccctctgggtttgaacctgataaaagcagttggggctggaactggttggagagatggatggctgttcgcccatgggaaaaccgctttcttgacataaatctcagagatggagtgatgatttatgaagatgaaacagctgctgaggtcaagaatggcagcaaatcccagctaaaaactactaccaagaaaggagttgcctcaaaccttcaatcaaccatttcaagtcagaaaacaggtccatctcattctgatggtggcagttcctcccctagtaagtcagcaggcatgttagatgtgcccgacactctttttactaaaccaaagccaaagctagttcttgaagacctggttgaagaagccaactcaagacgtgctattgttacaagatctcacagcaacccaaaggagagaactacccaactagataaacaggcaaggaagagattgtctctgcctaacagtggggggggtactggcgctcaggtagccaggcatagcagaaacgctactagaggggcacctagctctcagaagcccatcaaggatagatccaagttaaacgggaaaggagatccaaacaccgcaaagtctgttgcacaggctgtttga

SEQ ID NO: 962 - protein, 503 aa, Populus balsamifera subsp. trichocarpa
  misc_feature: Ceres ANNOT ID no.1439623
  misc_feature: Bit score of 84.7 for HMM based on sequences of FIGURE 16.
  misc_feature (163)..(183): Pfam Name: IQ Pfam Description: IQ calmodulin-binding motif
  misc_feature: Functional Homolog Of Ceres SEEDLINE ID no. ME24091 at SEQ ID NO. 922
MDKNEVYPIIIHHPGVFYPTLGLTPHSLPLPRPLILFLLLLLLSFSLTLTDAPDSLLPASSYPSLPLRRTGKWFKALVGLKKSEKSQSLDKDENRTSASKFRHRRKHSVEFDGDKFEEEFDNHDNVATVGDTNVVSVPDASESPSASLQVQDVAHNQQVLREEWAATRIQTAFRGFLARRALRALKGLVRLQALVRGHAVRKQAAITLRCMQALVRVQARVRARRVRLALESQTAQHKLQQQLANEARVQEIEEGWCDSVGSVEQIQAKLLKRQEAAAKRERAMAYALAHQWQAGSRLQAAPSGFEPDKSSWGWNWLERWMAVRPWENRFLDINLRDGVMIYEDETAAEVKNGSKSQLKTTTKKGVASNLQSTISSQKTGPSHSDGGSSSPSKSAGMLDVPDTLFTKPKPKLVLEDLVEEANSRRAIVTRSHSNPKERTTQLDKQARKRLSLPNSGGGTGAQVARHSRNATRGAPSSQKPIKDRSKLNGKGDPNTAKSVAQAV

SEQ ID NO: 963 - DNA, 1380 bp, Populus balsamifera subsp. trichocarpa
  misc_feature: Ceres ANNOT ID no.1526424
  misc_feature: Encodes the peptide sequence at SEQ ID NO. 964
atggggaagaaaggaagtggatggtttacatctgtgaagaaagtgttcaaatcatctcccaaggaattaccaatagagaaaaagaaagacaatgtagagaaatggcaacatgaggccccagaagttgtttcatttgagcattttcctgctgaaagttctcctgatgttacacatgatgagagcaatgcatcaagtccagtaactgaagatagaaaccatgtcattgctgtggcagtagcaactgctgctgcagctgctcaagcggcagctaacgttgttcgcttagccggttatggtcgatactctaaggaagaaagagctgccatcctcattcaatcatactataggggctaccttgctcggcgtgccttacgtgccttgaagggattggtgaggcttcaagcactagttaggggccataatgtacgaaagcaagcacaaatgacaatgagatgtatgcaagcacttgttcgagtgcaagcaagagtaagagcaagaaggcttcagttaactcatgagaagcttcaaatgaaggccgaggaagaagatgaacgaagactatcggtggttgaagaaattatgaatcctaagagtccattgaagagttataaatgggatagtaggaatcgaagtccaggtaaaatattcaaggaaaatgcttcaaagaaacatgatgctgtcatgaagagggaaagagcccttgcttatgcttacgcctacgagcagcagcagccattactctcccaaaatagtccaaacggtaaagaaataggacattttgtggatggaagtgagaaggctcaatggggctggaattggcttgagggatggatgtcagcacaaccatataatgtgcgtcaattgggtccaaatgaaggctcctatgtgacattaaacacaaccacagccacagccacgaccgatgacatgtccgagaagacagtggagatggacatggtcaccccaacaggcacgagcaactctaacatgggcatacttgatgccaatctgtcttcgaatcgacaccaacgacaactgagttcgagcaatgtacctagctacatggctccgacccaatccgcgaaggcaaaagtgcgtagtcagggctcgaccaagcaacaatatgccccaggtacacctctgcggaatccattcactaagaaaggatcaagcattaatggtggttcaggttgtgattcttctagttcaggtggcggcacaacttaccaggctctaaggagcccgagcccaaaacaaaacgggatgcgtctccattctaaaagacatgctggcgggtatagccctgatttcaatggtggtggtgatgattggagggtgcctcctcttgatggtcatggatggaggaatgatttcggttga

SEQ ID NO: 964 - protein, 459 aa, Populus balsamifera subsp. trichocarpa
  misc_feature: Ceres ANNOT ID no.1526424
  misc_feature: Bit score of 50.7 for HMM based on sequences of FIGURE 16.
  misc_feature (105)..(125): Pfam Name: IQ Pfam Description: IQ calmodulin-binding motif
  misc_feature: Functional Homolog Of Ceres SEEDLINE ID no. ME24091 at SEQ ID NO. 922
MGKKGSGWFTSVKKVFKSSPKELPIEKKKDNVEKWQHEAPEVVSFEHFPAESSPDVTHDESNASSPVTEDRNHVIAVAVATAAAAAQAAANVVRLAGYGRYSKEERAAILIQSYYRGYLARRALRALKGLVRLQALVRGHNVRKQAQMTMRCMQALVRVQARVRARRLQLTHEKLQMKAEEEDERRLSVVEEIMNPKSPLKSYKWDSRNRSPGKIFKENASKKHDAVMKRERALAYAYAYEQQQPLLSQNSPNGKEIGHFVDGSEKAQWGWNWLEGWMSAQPYNVRQLGPNEGSYVTLNTTTATATTDDMSEKTVEMDMVTPTGTSNSNMGILDANLSSNRHQRQLSSSNVPSYMAPTQSAKAKVRSQGSTKQQYAPGTPLRNPFTKKGSSINGGSGCDSSSSGGGTTYQALRSPSPKQNGMRLHSKRHAGGYSPDFNGGGDDWRVPPLDGHGWRNDFG

SEQ ID NO: 965 - DNA, 1398 bp, Populus balsamifera subsp. trichocarpa
  misc_feature: Ceres ANNOT ID no.1520883
  misc_feature: Encodes the peptide sequence at SEQ ID NO. 966
atggggaagaaaggaaaaggatggtttacatctgtgaagagagtgttcaaatcatcatctcctaaggaattaccagtagggaaaaagaaagacaacgcagagaaatggcaacatgaggctccagaagttgtgtcattagagcattttcctactggaagttctcctgatgttacaaatgatgagagcaatgtatcaactccagtaactgaagatagaaatcatgccattgctgtggcagtagcgactgctgccgcagcagaagctgcggttgcagctgctcaagcggcggctaaagttgttcgcttagctggttatggacgacaatcaaaggaagaaagagctgccatcctcatacaatcattctataggggctaccttgctcggcgtgccttacgcgcattgaagggattggtgaggctccaagcattagtgagaggccacaatgtaagaaagcaagcacaaatgacaatgagaagcatgcaagctcttgttcgtgtgcaagcaagagtaagagcaagaagacttgaattagctcacgagaagcttcaaaggaagacagaggaagaagatgaacgaagactaccagtggacgaagactttatgaatccaaagaatccattgaagagttataaatgggataggaggaatcaaagttcagataatttcaaagaaaatgcttcaaagaagcatgatgctgtcatgaaaagagagagagcccttgcttatgcttatgccttccagcagcagcagcagcaacaattactctcacaaaatagtcctaatggtaaagaaacaggacattttgtgaacgaacacgagaagatgcaatggggatggaattggcttgagagatggatgtcagcacaatcatataacgtgcgtcaatcgggtccaaatgaagggtcttacgtgacagtaaacacaactacaaccacgaccaccacagaggacatgtccgagaagacagtagagatggacatggtgaccccaacaggcactagcaatcccaacatgggcatgctagacaccaatccatattcgaatcgaccccaatggcaatcaagttcaagcaatgtacgtagctacatggctccgacccagtccgcaaaggcgaaagtgcgttctcaaagtttgatcaagcaacgtgccccagcgacacctctgtggaatccatccaccaagaaagattcaagcattgttggtccaggttgtgattcttccagttcaggtggtggaacaacaacttatcacgctccaagaagtcctagccccaaacataacgggatgcgcctgcattcgagaagacatgctggtggatatagccctgatttcaatggcggtgatgattggaggttgcctcctcttgatggtcatggatggaggaatgattttggttga

SEQ ID NO: 966 - protein, 465 aa, Populus balsamifera subsp. trichocarpa
  misc_feature: Ceres ANNOT ID no.1520883
  misc_feature: Bit score of 60.5 for HMM based on sequences of FIGURE 16.
  misc_feature (112)..(132): Pfam Name: IQ Pfam Description: IQ calmodulin-binding motif
  misc_feature: Functional Homolog Of Ceres SEEDLINE ID no. ME24091 at SEQ ID NO. 922
MGKKGKGWFTSVKRVFKSSSPKELPVGKKKDNAEKWQHEAPEVVSLEHFPTGSSPDVTNDESNVSTPVTEDRNHAIAVAVATAAAAEAAVAAAQAAAKVVRLAGYGRQSKEERAAILIQSFYRGYLARRALRALKGLVRLQALVRGHNVRKQAQMTMRSMQALVRVQARVRARRLELAHEKLQRKTEEEDERRLPVDEDFMNPKNPLKSYKWDRRNQSSDNFKENASKKHDAVMKRERALAYAYAFQQQQQQQLLSQNSPNGKETGHFVNEHEKMQWGWNWLERWMSAQSYNVRQSGPNEGSYVTVNTTTTTTTTEDMSEKTVEMDMVTPTGTSNPNMGMLDTNPYSNRPQWQSSSSNVRSYMAPTQSAKAKVRSQSLIKQRAPATPLWNPSTKKDSSIVGPGCDSSSSGGGTTTYHAPRSPSPKHNGMRLHSRRHAGGYSPDFNGGDDWRLPPLDGHGWRNDFG

SEQ ID NO: 967 - DNA, 1659 bp, Populus balsamifera subsp. trichocarpa
  misc_feature: Ceres ANNOT ID no.1467154
  misc_feature: Encodes the peptide sequence at SEQ ID NO. 968
atgggaaagaagggcggtacctcatggttgaccatcgtgaaaagagcattcaggtctccaagtaaagagaatgagaaaaagagtagcagaaggagagaagaacatgaccaggaagaggaagaaaagaaaagagagaaaagaagatggctttttagaaagacgtcgtccagcactaaccatgtcccagttcaacgatgtgaagaaaatattgcaataacgaacacaacaagtactgccactgcacccttgagtcctactttggatgctgagaaaaaacttgcagtggcagtggcagcagccacagctgcggcagctgatgctgcagctgtaacagcccaagcagcagtagagattgttagactcactagaccagcttccatctttgttagagctaaactctgggctgctattgccattcaaacggcctttagaggctacctagcaaggagagctctacgtgcactgaaagggctagtgaagcttcaagctttggtaagaggacacaatgtaagaaagcaagcgaagctaacacttcaatacatgcaagctttagctcgagtacaagatcgagtccgtgaccaccgagcaaggctttcacatgaagggagcagaaggtccatgttttctgagactaatagctcatgggagttcaaatatctccacgaaatccgtgagaggaagtccatgtcgagagatgtaagctctgttctagatgattgggatgatcgtccacgcaccaatgaagagattgaagccatggtggaaagtaagaaggaagctgcattaaaacgtgaaaaggccctggcttatgctttctctagccagatatggaggtctagaaggaacccatcagcaggggatgaaaaggagcttgaagacagaacaggatggcttgatcgctggatggcaacaaagcaatgggaggcaagtagcagggcaataacagatagaaaagacaacagtataaagactgtagaaatggacacatctagaccattttcatattctactacaacttcttctcaaagattacaaagccaaaatcacctacaaaaacaaacccccagacattctattgcttctcctctccatagatcacactccagtctttctctccaccaatcgccaatcacaccctctccttgcaaacccaggccccttcaagtacgttcagccagtccaagatgcctaaaagaagaaaaaaaatgctactcagcagcacatactccaagcttgagctctagatatttcatgaacaatggtattggtcgacatggaatggtgggtgcaagtgggggcactgctacaatcttgccaaactacatggcagcaactgagtcagcaaaggctcgtgttaggccacagagtgcaccaaggcagagaccatcgacacctgagagagaacgtggtggatcggttgcgaagaaacgtctgtcattcccagttcaagatcatggaccacatggaaatggtgctggcattattgactacagtagcaataggagcttcagtcagaatttaaggagccctagcttcaagagtgtgcatggttgccactttggaatgggagagcaatcaaattatttctcatgttataatgagagcattggtggagaaatatctccttgttccacgactgaccttaggtggttaaaataa

SEQ ID NO: 968 - protein, 552 aa, Populus balsamifera subsp. trichocarpa
  misc_feature: Ceres ANNOT ID no.1467154
  misc_feature: Bit score of 76.4 for HMM based on sequences of FIGURE 16.
  misc_feature (133)..(153): Pfam Name: IQ Pfam Description: IQ calmodulin-binding motif
  misc_feature: Functional Homolog Of Ceres SEEDLINE ID no. ME24091 at SEQ ID NO. 922
MGKKGGTSWLTIVKRAFRSPSKENEKKSSRRREEHDQEEEEKKREKRRWLFRKTSSSTNHVPVQRCEENIAITNTTSTATAPLSPTLDAEKKLAVAVAAATAAAADAAAVTAQAAVEIVRLTRPASIFVRAKLWAAIAIQTAFRGYLARRALRALKGLVKLQALVRGHNVRKQAKLTLQYMQALARVQDRVRDHRARLSHEGSRRSMFSETNSSWEFKYLHEIRERKSMSRDVSSVLDDWDDRPRTNEEIEAMVESKKEAALKREKALAYAFSSQIWRSRRNPSAGDEKELEDRTGWLDRWMATKQWEASSRAITDRKDNSIKTVEMDTSRPFSYSTTTSSQRLQSQNHLQKQTPRHSIASPLHRSHSSLSLHQSPITPSPCKPRPLQVRSASPRCLKEEKKCYSAAHTPSLSSRYFMNNGIGRHGMVGASGGTATILPNYMAATESAKARVRPQSAPRQRPSTPERERGGSVAKKRLSFPVQDHGPHGNGAGIIDYSSNRSFSQNLRSPSFKSVHGCHFGMGEQSNYFSCYNESIGGEISPCSTTDLRWLK

SEQ ID NO: 969 - DNA, 1593 bp, Populus balsamifera subsp. trichocarpa
  misc_feature: Ceres ANNOT ID no.1462019
  misc_feature: Encodes the peptide sequence at SEQ ID NO. 970
atgactccacgcactaagaaacggcatcgttcactgtttaaaatgaaagcaacgagagaatttcatttttccttagcgaatccaaattctcagtcagcgagcgagcgagcgagttttgacttgcgggctgggattgataagatcgaacggtcaaaaaggaagtggcaccatatgggtgtctcagggaaatggtttaaagctttggttggtctaaagaagtctgaaaagtcacagtctttggacaaagaggaaaatggggcgactgctagcaagtctcgacataggagaaagcattcggttgagtttgatgctgataaaattcaagaggagtttcataatcataatcataatcataatcataatcataatgatggtgacgccaacattcgttccatcccagatacttctgaatctccttttgattcgcttcaagttcaggatttagctcataatcaacaagttatgagagaagaattggctgccactcgcattcaaacagctttccgcgggtttctgggagttggggctttggaattctcacatgttccactaaagctctctcaggcaagaagagctctgcgagctttgaaaggattagtgagactgcaagctcttgttcggggccatgctgtgagaaaacaagctgcaataactcttcgctgcatgcaagctttggtgagagttcaggctcgagttcgtgcaaggcgtgttcgcttagcattggaaagtcaaacagctcaacagaaacttcagcaacaactagctaatgaggcccgggttcgagaaatagaggcttgccaagtgccttatatcaatttcacttttacacaggaaggatggtgtgatagtgtgggatctgttgaacaaattcaagccaagttgctgaagcggcaggaggctgcagctaagcgtgagagagctattgcatatgctctggcccatcagtggcaggctgggtcaagacaccaggctgttccatctggttttgaaccagataaaagcagttggggctggaactggttggagagatggatggctgttcgcccatgggagaaccgctttcttgacataaatcttagagatggagtgatgattcgtgaggatgaaacagctgctgaggtcaggaatggcagcaaatcccagttaaaaacaactgccaagaaagctattgcctcagatcttcagtcaaccatttcaagtcagaaaaaaggtccatctcattctgatggtggcagttcctcacctagtaagtcagcaggcatgttagaagcacccaacacacttttttctaaaccaaagccaaagccagttcttgaagacctggttgaagaagccatttcaaaacctgctatggctacaagatctcacagcaacccaaaggagagaaccacccaactagataaacaggcaaagaagagattgtctctgcctaacagtgttgaagcagggggaggtgcgggcactcaggcagctaggaatagcagaaatgctgctagagggacacctagctctcagaagcccatcagagatagatccaagttaaacgggaaaggagattcaaacaccacaaagtctgttgcacaggctgtttga

SEQ ID NO: 970 - protein, 473 aa, Populus balsamifera subsp. trichocarpa
  misc_feature: Ceres ANNOT ID no.1462019
  misc_feature: Bit score of 62.7 for HMM based on sequences of FIGURE 16.
  misc_feature (101)..(115): Pfam Name: IQ Pfam Description: IQ calmodulin-binding motif
  misc_feature: Functional Homolog Of Ceres SEEDLINE ID no. ME24091 at SEQ ID NO. 922
MGVSGKWFKALVGLKKSEKSQSLDKEENGATASKSRHRRKHSVEFDADKIQEEFHNHNHNHNHNHNDGDANIRSIPDTSESPFDSLQVQDLAHNQQVMREELAATRIQTAFRGFLGVGALEFSHVPLKLSQARRALRALKGLVRLQALVRGHAVRKQAAITLRCMQALVRVQARVRARRVRLALESQTAQQKLQQQLANEARVREIEACQVPYINFTFTQEGWCDSVGSVEQIQAKLLKRQEAAAKRERAIAYALAHQWQAGSRHQAVPSGFEPDKSSWGWNWLERWMAVRPWENRFLDINLRDGVMIREDETAAEVRNGSKSQLKTTAKKAIASDLQSTISSQKKGPSHSDGGSSSPSKSAGMLEAPNTLFSKPKPKPVLEDLVEEAISKPAMATRSHSNPKERTTQLDKQAKKRLSLPNSVEAGGGAGTQAARNSRNAARGTPSSQKPIRDRSKLNGKGDSNTTKSVAQAV

SEQ ID NO: 971 - DNA, 1713 bp, Populus balsamifera subsp. trichocarpa
  misc_feature: Ceres ANNOT ID no.1444522
  misc_feature: Encodes the peptide sequence at SEQ ID NO. 972
atggggaagaagggaggtagctcatggttgactgctgtgaaaagggcgtttagatctccaactaaagaaagtgacaagagggctactggggttggccatgaccaagaagaagatgaagaaaagaagagagggaagagaagatggttatttaggaaacctacaaatcaagaaacggcgacacaacagaacctgtcaaaggcaggaaatgttaaggcatccccaggtggtggtggaggtgctccagcagaccatgtgtcggcagctgcagcagctgagcaaaggcatgcaattgcagtagcagttgctactgcagctgcagctgaagctgctgtagccactgcccaggcggcggcggaggttgctcggctcactaggccttcatatcatcctagagaacattatgctgccattgtcattcaaacagcttttagaggatacttggcaaggcgggctcttcgtgcacttaaagggctagtgaagttgcaagctttagtaaggggacacaatgtgagaaaacaggccaagatgaccctgcgatgcatgcaagctctggctcgagtgcaggctcgagtgcttgatcaacgcgtgagactttcacatgaaggcagcaggaaatctgcatttagtgacaccaatagcgtgcttgaatcgcgatatcttcaagacatttcagatagaaaatccatgtcaagagaaagcagtagcattgcagatgattgggatgatcggccacactccattgaggaagtcaaggccatgttgcaacgcaggaaagaagctgcgttcaagcgtgaaaagaccttatctcaagctttctctcagcagctcatggctaattggttcaattttttcaaacccatgtccaagatatggagaaatggcagaagcccatcaaatggcaatgaagatgagctccaagaaagaccacaatggcttgatcaatggatgcctgcaaagccatgggacaatagcagcagagcaagagcttcaactgatcaaagagaccccatcaaaactgtagaaattgacacctcccaaccttattcatatttagttcctaattttagaagaacaaaccaaaaccaacatcaccaacaccagagatccaattcatcaaacaatggtgtggcacactctgctccttctccactccatagagctcatcaaactgctccactccaccactctcctatcacaccctccccatcaaaaactaggcctcttcaggttcgttcagctagtccacgatgtgcaagagaagatagaagttgtaattcctctcaaacaccaagtttaaggtccaattatttttacaatggaagtttgaatcaacatggaatcaggggtggtgctagtgttagtagtaatggtaatgctacattgccaaattacatggctgcaaccgagtctgccaaggctagattgagatcacagagtgcaccaaggcaaagaccatcaacaccagaacgagaccggattgggtctgcaagaaaacggctttcgtatccagcccccgacccttgtgatgtcggtatagtttatggcggtgctggttacggccatggtttaaggagtccaagctttaagagcgtgagcggttcacgtttgggtggactagaacaacagtctaactattcttcttgctgtacggatagctttggtggtgagctttccccttcttcaactaacgatcttaggaggtggttgagatga

SEQ ID NO: 972 - protein, 570 aa, Populus balsamifera subsp. trichocarpa
  misc_feature: Ceres ANNOT ID no.1444522
  misc_feature: Bit score of 57.4 for HMM based on sequences of FIGURE 16.
  misc_feature (133)..(153): Pfam Name: IQ Pfam Description: IQ calmodulin-binding motif
  misc_feature: Functional Homolog Of Ceres SEEDLINE ID no. ME24091 at SEQ ID NO. 922
MGKKGGSSWLTAVKRAFRSPTKESDKRATGVGHDQEEDEEKKRGKRRWLFRKPTNQETATQQNLSKAGNVKASPGGGGGAPADHVSAAAAAEQRHAIAVAVATAAAAEAAVATAQAAAEVARLTRPSYHPREHYAAIVIQTAFRGYLARRALRALKGLVKLQALVRGHNVRKQAKMTLRCMQALARVQARVLDQRVRLSHEGSRKSAFSDTNSVLESRYLQDISDRKSMSRESSSIADDWDDRPHSIEEVKAMLQRRKEAAFKREKTLSQAFSQQLMANWFNFFKPMSKIWRNGRSPSNGNEDELQERPQWLDQWMPAKPWDNSSRARASTDQRDPIKTVEIDTSQPYSYLVPNFRRTNQNQHHQHQRSNSSNNGVAHSAPSPLHRAHQTAPLHHSPITPSPSKTRPLQVRSASPRCAREDRSCNSSQTPSLRSNYFYNGSLNQHGIRGGASVSSNGNATLPNYMAATESAKARLRSQSAPRQRPSTPERDRIGSARKRLSYPAPDPCDVGIVYGGAGYGHGLRSPSFKSVSGSRLGGLEQQSNYSSCCTDSFGGELSPSSTNDLRRWLR

SEQ ID NO: 973 - DNA, 1918 bp, Arabidopsis thaliana
  misc_feature: Ceres CLONE ID no.106263
  misc_feature: Encodes the peptide sequence at SEQ ID NO. 974
acaaatactcttcttcacacagctttgaatccatctgtcttctcctctctctctcttctccatttgcaattacgataatgtgaaagcaataagaagaggaaaagttatcttcgcacctcagcaaagatccaatcgattcgattcttaagctttttcgtcttctccgataaggtcactacttagaagccgcgttgtggtttagttgactcctccaggttttatcttcaagctttttcgtctatcagatctggtgtcactgtcttctcataggattacatagagatggggaaaaaagctaaatggttttcaagtgttaagaaagcattcagcccagattcaaagaagtcgaagcaaaaattggctgagggacaaaatggtgttatctctaatcctcctgttgtggataatgttagacaatcttcttcttctcctcctcctgctcttgctcctcgtgaagtgagagtagctgaagtgattgttgaacggaacagggatctttcacctccttctacagcagatgctgtgaatgttacagctactgatgttcctgtagttccatcttcatctgctcctggtgttgttcgtcgcgctacacctactcgatttgctggaaagtcaaacgaagaagccgctgctatcttgatccagactatatttagaggttatttggcaaggagagcgttgcgggcaatgaggggtttggtcagacttaagttattgatggaaggatctgttgttaagcggcaagctgcaaatactctaaaatgtatgcagactctctctcgtgtacagtcgcagatccgagctaggagaatcaggatgtcagaagagaatcaggctcgccagaaacaactccttcagaaacatgctaaagagctagctggcttgaagaacggggataactggaatgatagcattcaatcaaaggagaaagttgaagcgaatttgctaagcaagtacgaggcaacaatgagaagggaaagggcattggcttattcatactctcatcagcaaaactggaagaacaactctaaatctggaaacccgatgttcatggatccaagcaacccgacatggggttggagctggttggagagatggatggctggtaggccactagagagttccgagaaagaacaaagcaacagcaacaatgacaatgctgcctcggtcaagggctctattaaccgcaacgaagctgcaaaatctctaacccgcaatggctcaactcaaccaaacacaccatcatccgcaagagggaccccaagaaacaaaaacagtttcttctcacctccaactccctcaaggctaaaccaatcctcgaggaaatccaatgacgacgactccaaaagcacaatctcggtcctgtccgagaggaaccgcagacacagcattgctggttcatcagtcagagacgatgagagcctcgctggctcaccagctctcccgagctacatggttccaactaaatcagctcgagccaggctcaagccccaaagcccattaggtggtaccacacaggaaaacgaagggttcacagacaaggcatcagctaagaaacggctctcgtatccaacttcgcctgcattgcctaaaccacggcggttctcagctccccctaaggtggagagtggcggcgttaccgtgaccaacggagcaggcagctgaggtattttatttaatataattattttcccacttatgaatgtgtccgagattgttgtctcttatgtgttcccttcatttcgtaattcatttgtgcagtgtaagcgccagtcatttatttttttactataataaattttataaccttttaaaattcatgttcttttgtttctttgaatatttaagttatttttattaatgttggatgaattggaatatgatgatgttatttgtattgtaatgcagatccttt

SEQ ID NO: 974 - protein, 461 aa, Arabidopsis thaliana
  misc_feature: Ceres CLONE ID no.106263
  misc_feature: Bit score of 1078.0 for HMM based on sequences of FIGURE 16.
  misc_feature (115)..(135): Pfam Name: IQ Pfam Description: IQ calmodulin-binding motif
  misc_feature: Functional Homolog Of Ceres SEEDLINE ID no. ME24091 at SEQ ID NO. 922
  misc_feature (88)..(88): Xaa is any aa, unknown, or other
  misc_feature (180)..(180): Xaa is any aa, unknown, or other
  misc_feature (243)..(243): Xaa is any aa, unknown, or other
  misc_feature (370)..(370): Xaa is any aa, unknown, or other
  misc_feature (377)..(377): Xaa is any aa, unknown, or other
MGKKAKWFSSVKKAFSPDSKKSKQKLAEGQNGVISNPPVVDNVRQSSSSPPPALAPREVRVAEVIVERNRDLSPPSTADAVNVTATDXPVVPSSSAPGVVRRATPTRFAGKSNEEAAAILIQTIFRGYLARRALRAMRGLVRLKLLMEGSVVKRQAANTLKCMQTLSRVQSQIRARRIRXSEENQARQKQLLQKHAKELAGLKNGDNWNDSIQSKEKVEANLLSKYEATMRRERALAYSYSHXQNWKNNSKSGNPMFMDPSNPTWGWSWLERWMAGRPLESSEKEQSNSNNDNAASVKGSINRNEAAKSLTRNGSTQPNTPSSARGTPRNKNSFFSPPTPSRLNQSSRKSNDDDSKSTISVLSERNRRHXIAGSSVXDDESLAGSPALPSYMVPTKSARARLKPQSPLGGTTQENEGFTDKASAKKRLSYPTSPALPKPRRFSAPPKVESGGVTVTNGAGS

SEQ ID NO: 975 - protein, 445 aa, Arabidopsis thaliana
  misc_feature: Public GI ID no.7413581
  misc_feature: Bit score of 995.5 for HMM based on sequences of FIGURE 16.
  misc_feature (114)..(134): Pfam Name: IQ Pfam Description: IQ calmodulin-binding motif
  misc_feature: Functional Homolog Of Ceres SEEDLINE ID no. ME24091 at SEQ ID NO. 922
MGKKAKWFSSVKKAFSPDSKSKQKLAEGQNGVISNPPVVDNVRQSSSSPPPALAPREVRVAEVIVERNRDLSPPSTADAVNVTATDVPVVPSSSAPGVVRRATPTRFAGKSNEEAAAILIQTIFRGYLARRALRAMRGLVRLKLLMEGSVVKRQAANTLKCMQTLSRVQSQIRARRIRMSEENQARQKQLLQKHAKELAGLKNGDNWNDSIQSKEKVEANLLSKYEATMRRERALAYSYSHQQNWKNNSKSGNPMFMDPSNPTWVPRKNKSNSNNDNAASVKGSINRNEAAKSLTRNGSTQPNTPSSARGTPRNKNSFFSPPTPSRLNQSSRKSNDDDSKSTISVLSERNRRHSIAGSSVRDDESLAGSPALPSYMVPTKSARARLKPQSPLGGTTQENEGFTDKASAKKRLSYPTSPALPKPRRFSAPPKVESGGVTVTNGAGS

SEQ ID NO: 976 - protein, 454 aa, Arabidopsis thaliana
  misc_feature: Public GI ID no.15232741
  misc_feature: Bit score of 578.9 for HMM based on sequences of FIGURE 16.
  misc_feature (108)..(128): Pfam Name: IQ Pfam Description: IQ calmodulin-binding motif
  misc_feature: Functional Homolog Of Ceres SEEDLINE ID no. ME24091 at SEQ ID NO. 922
MVKKAKWLKNVKKAFSPDSKKLKHESVECQDSVISYPVLIATSRSSSPQFEVRVDEVNYEQKKNLYPPSSDSVTATVAHVLVDSPPSSPESVHQAIVVNRFAGKSKEEAAAILIQSTFRGHLARRESQVMRGQERLKLLMEGSVVQRQAAITLKCMQTLSRVQSQIRSRRIRMSEENQARHKQLLQKHAKELGGLKNGGNWNYSNQSKEQVEAGMLHKYEATMRRERALAYAFTHQQNLKSFSKTANPMFMDPSNPTWGWSWLERWMAGRPWESSEKEQNTTNNDNSSVKNSTNRNSQGGETAKSSNRNKLNSSTKPNTPSASSTATRNPRKKRPIPSSIKSKSSDDEAKSSERNRRPSIARPSVSDDETLSSSTARRSSNLIPTTKSARGKPKSQTSSRVAVTTSTTEESSILPEKAPAKKRLSTSASPAPKPRRSSAPPKVEKGVLKAERTP

SEQ ID NO: 977 - protein, 430 aa, Arabidopsis thaliana
  misc_feature: Public GI ID no.15231175
  misc_feature: Bit score of 521.2 for HMM based on sequences of FIGURE 16.
  misc_feature (108)..(128): Pfam Name: IQ Pfam Description: IQ calmodulin-binding motif
  misc_feature: Functional Homolog Of Ceres SEEDLINE ID no. ME24091 at SEQ ID NO. 922
MGKSWFSAVKKALSPEPKQKKEQKPHKSKKWFGKSKKLDVTNSGAAYSPRTVKDAKLKEIEEQQSRHAYSVAIATAAAAEAAVAAAQAAAEVVRLSALSRFPGKSMEEIAAIKIQTAFRGYMARRALRALRGLVRLKSLVQGKCVRRQATSTLQSMQTLARVQYQIRERRLRLSEDKQALTRQLQQKHNKDFDKTGENWNDSTLSREKVEANMLNKQVATMRREKALAYAFSHQNTWKNSTKMGSQTFMDPNNPHWGWSWLERWMAARPNENHSLTPDNAEKDSSARSVASRAMSEMIPRGKNLSPRGKTPNSRRGSSPRVRQVPSEDSNSIVSFQSEQPCNRRHSTCGSIPSTRDDESFTSSFSQSVPGYMAPTQAAKARARFSNLSPLSSEKTAKKRLSFSGSPKTVRRFSGPPKLESNVTKKDTNLA

SEQ ID NO: 978 - protein, 516 aa, Arabidopsis thaliana
  misc_feature: Public GI ID no.15225299
  misc_feature: Bit score of 157.2 for HMM based on sequences of FIGURE 16.
  misc_feature (137)..(157): Pfam Name: IQ Pfam Description: IQ calmodulin-binding motif
  misc_feature: Functional Homolog Of Ceres SEEDLINE ID no. ME24091 at SEQ ID NO. 922
MKDLSENFRRKWKPEKPKRKWSFGKQKSRESFDFPLEETPPVDPSPSSVHRPYPPPPPLPDFAPQPLLPPPSPPPPPPAYTINTRIYGESKESKNRQALALASAVAAEAAVVAAHAAAEVIRLTTPSTPQIEESKEETAAIKIQNAYRCYTARRTLRALRGMARLKSLLQGKYVKRQMNAMLSSMQTLTRLQTQIQERRNRLSAENKTRHRLIQQKGHQKENHQNLVTAGNFDSSNKSKEQIVARSVNRKEASVRRERALAYAYSHQQTWRNSSKLPHQTLMDTNTTDWGWSWLERWMASRPWDAESIDDQVSVKSSLKRENSIKSSPARSKTQKSASQSSIQWPVNNDTKSRKIEVTNRRHSIGGGSSENAKDDESVGSSSSRRNSLDNTQTVKSKVSVETTSNVSNAQTVKPKANVGAKRNLDNTKTLKSKSSVGTTGNLANTEAVKSKVNVGTTSMPKKEVVADKKKPPQMVLPKKRLSSSTSLGKTKKLSDSDKATTGVANGEKKRRNGGSS

SEQ ID NO: 979 - protein, 517 aa, Arabidopsis thaliana
  misc_feature: Public GI ID no.15231733
  misc_feature: Bit score of 78.0 for HMM based on sequences of FIGURE 16.
  misc_feature (169)..(189): Pfam Name: IQ Pfam Description: IQ calmodulin-binding motif
  misc_feature: Functional Homolog Of Ceres SEEDLINE ID no. ME24091 at SEQ ID NO. 922
MGKKGSWFSAIKRVFTPHSKEKQLSNNNQEPEIKSENKEKKKKGFGKKLRNGETNSFLPIFRQPSSIEKILSEAEREHNLVFRPPTPTDRANSSSTSVASPLVRPASPKVPSQRYVSSPKPISPRVAYPQVHYPKPPSPKPPSPRAVSPRIVQRREFVHRPEPSLLVKNAYAIKIQAAFRGYMARRSFRALKGLVRLQGVVRGHSVKRQTMNAMKYMQLLVRVQTQVQSRRIQMLENRARNDKDDTKLVSSRMSDDWDDSVLTKEEKDVRLHRKIDAMIKRERSMAYAYSHQLWKNSPKSAQDIRTSGFPLWWNWVDRQKNQNQPFRLTPTRPSLSPQPQSSNQNHFRLNNSFDTSTPNSSKSTFVTPSRPIHTPQPYSSSVSRYSRGGGRATQDSPFKDDDSLTSCPPFSAPSYMAPTVSAKAKLRANSNPKERMDRTPVSTNEKRRSSFPLGSFKWNKGSLFMSNNSNNKGPGSSSSGAVVLEKHKTLKSVGNLSIDSTVSMPATIGRRAFNRFA

SEQ ID NO: 980 - DNA, 1703 bp, Glycine max
  misc_feature: Ceres CLONE ID no.467508
  misc_feature: Encodes the peptide sequence at SEQ ID NO. 981
aaaccatcctctcttagcatttggcaagatctgatttccctcttcacaaggagagaaatagaaaggcatatgatcttcttcaagttgcaatctttttagagagagagggttagaagaacaacatacttgagatctgtcactttgtttgagttcagatcttcaaagtttccttccttgttcttttggtgcaaaggatcaaattaaggaatgccaaatggggaggaaggggaattggttttccagtgtgatgaaagctctcagtcctgactcaaaggagaagaaagaacagaaatcaagtaaatctaagaagaaatggtttgggaagcaaaaattggagacttcagtctcatactcagaagctcataaagcaccaccaccaccgcgacctattcctccaccagaagcgattaaattaactgatattgaaaatgaaatcagtcatgatcacgactatgttgttgaagttgcaactgccatggatgccgaggaacctgttccttctgttcagatagaacctgttagggttgaagctgccccaattgctcattatgctggtaaaccaaaggatgaagtggcagctatcaaaattcaaacagcttttcgtggatacttggcaagaagagcattgcgggctttaagggggctggtcaggttgaaattattgatggaagggccagttgttaaacgccaagccacaagtaccctccactctatgcagacattatctcgcttgcagtctcagattcgttcaaggaggatcagaatgttagaggagaatcaggctctgcagagacagctcttacagaagcatgcaagagagcttgagagcttgcggatgggagaggaatgggatgacagcctacaatcaaaagaacaaatcgaagccaagttacttagcaagtatgaagctactacgagaagagaaagagcgctggcttatgcattcactcatcagcaaaattggaagaactcatctagatctgtaaatccaatgttcatggatccaaccaatccaagctggggttggagctggttggaacgatggatggcagcccgaccttgggagagccgtagccatatggataaagagttgaatgaccactcatccgtaagaagctcaagccgcagtattaccggtggagaaatcagcaagtcatttgctcgtttccagctcaatttggaaaagcactctccaacagcctgccagaatcctggctcacctagctttcagtccactccttccaagccagcttcaatatctgctaagaaaccaaagaaggtaagtccaagcccaaggggcagctgggttacagacgaggactccaaaagcttggtcagtgtacagtcagaccggttccggaggcactccattgccggttcattggtgagagatgatgagagccttgctagctctccagcagttccaagctacatggtgccaactcaatctgcaaaagccaagtccaggacacaaagtccattagccccagaaaatggaaaagcagagaaaggttcctttgggagtgcgaagaagcggctttctttcccagcttcacctgccaggccaaggcgccattcaggtccaccaaaggtagaaagcagcagcttaaatgcagagttagctgtggacaagggtgtggacagttgatcatacaagtaaaaggatggaaaaacattaaagtaggattgaaaatatatcactg

SEQ ID NO: 981 - protein, 477 aa, Glycine max
  misc_feature: Ceres CLONE ID no.467508
  misc_feature: Bit score of 1227.7 for HMM based on sequences of FIGURE 16.
  misc_feature (119)..(139): Pfam Name: IQ Pfam Description: IQ calmodulin-binding motif
  misc_feature: Functional Homolog Of Ceres SEEDLINE ID no. ME24091 at SEQ ID NO. 922
MGRKGNWFSSVMKALSPDSKEKKEQKSSKSKKKWFGKQKLETSVSYSEAHKAPPPPRPIPPPEAIKLTDIENEISHDHDYVVEVATAMDAEEPVPSVQIEPVRVEAAPIAHYAGKPKDEVAAIKIQTAFRGYLARRALRALRGLVRLKLLMEGPVVKRQATSTLHSMQTLSRLQSQIRSRRIRMLEENQALQRQLLQKHARELESLRMGEEWDDSLQSKEQIEAKLLSKYEATTRRERALAYAFTHQQNWKNSSRSVNPMFMDPTNPSWGWSWLERWMAARPWESRSHMDKELNDHSSVRSSSRSITGGEISKSFARFQLNLEKHSPTACQNPGSPSFQSTPSKPASISAKKPKKVSPSPRGSWVTDEDSKSLVSVQSDRFRRHSIAGSLVRDDESLASSPAVPSYMVPTQSAKAKSRTQSPLAPENGKAEKGSFGSAKKRLSFPASPARPRRHSGPPKVESSSLNAELAVDKGVDS

SEQ ID NO: 982 - protein, 468 aa, Medicago truncatula
  misc_feature: Public GI ID no.92868235
  misc_feature: Bit score of 1210.9 for HMM based on sequences of FIGURE 16.
  misc_feature (108)..(128): Pfam Name: IQ Pfam Description: IQ calmodulin-binding motif
  misc_feature: Functional Homolog Of Ceres SEEDLINE ID no. ME24091 at SEQ ID NO. 922
MGKKGNWFSTVKKALSPDSKKSSKSKKKWFGKQKLQTSDPSVEIDTALPLPPPEDIKLTDIENQNNHHNVAEITTVVDVEEPVRSVQTAVVKTQAATVSRFAGKPKDEVAAIKIQTAFRGYLARRALRALRGLVRLKTLMEGPAVKRQAMSTLRSMQTLARVQSQIRSRRVRMLEENQALQRQLLQKHAKELETMRIGEEWDDSLQSKEQIEAKLLSKYEATMRRERALAYAFTHQQNSKNSSRSMNPMFVDPTNPTWGWSWIERWMAARPWESRGLVDKELNDHSSVKSSSRSIIGGEISKSFARFQLNSEIHSPVASQNPGSPSFQSNSTPTKPASASVARKLKKASPKGSWVMDDDSKSMASVQSDRFRRHSIAGSSVRDDESLASSPSVPSYMVPTQSAKARLRTQSQSPLAKENGKQEKGSFGTAKKRLSFPASPARPRRHSGPPKVETAINAELPVPNGVAS

SEQ ID NO: 983 - protein, 438 aa, Medicago truncatula
  misc_feature: Public GI ID no.92876066
  misc_feature: Bit score of 74.3 for HMM based on sequences of FIGURE 16.
  misc_feature (96)..(116): Pfam Name: IQ Pfam Description: IQ calmodulin-binding motif
  misc_feature: Functional Homolog Of Ceres SEEDLINE ID no. ME24091 at SEQ ID NO. 922
MGVPGKWIRALVGLKKSEKRESLEKDGNASKFRHRRKNSVEIDNGKLQNEFDNDGAAPIGDADHANPQSNLEAHYSPSTSQQVQDPAHNHQITSEEWAAICIQTAFRGFLARRALRALKGLVRLQALVRGHAVRKQAAITLRCMQALVRVQARVRARRVRLSLESQTEQQKLQQQLVNEARVREIEEGWCDSVGSVEEIQAKILKRQEAAAKRERAMAYALAHQWQAGSRQQAISSGFEPDKSSWGWNWLERWMAVRPWENRFLDINTKDGVKADENDVMDGRNGIRPQFKSTNTKSNLANIHPSVVSHKTGPSLSDGCDSSSTSKSAGLLETSNTQSVKPKSNANVQNPVEETNSKSGVQRSQSNPKERNSQVDKPAKKRLSLPNHGVGSGAQTAKYPTRSNMKGTRSTQKPTRDKPKLNGGGDVNLTKSVPPPAVV

SEQ ID NO: 984 - DNA, 1695 bp, Triticum aestivum
  misc_feature: Ceres CLONE ID no.826796
  misc_feature: Encodes the peptide sequence at SEQ ID NO. 985
ataggacttcacagacagactgactcaatcctaacccaatccctcccatgcttccatctactctagcagaaattgcagaggaggttggccgccgccggctccagcgcaggcgcagcctacccgcgggatctgacgccctccgcctcctacctcgaggcacgcgcctcaggctcagctcccccgcccgccctcccccgctaccccgacgacttccaagaggaggagcatgaaattgagcatgtcgccgccgcgccagcgccagcgccagccacggatgcgccgctacctgcccctcctgccgccgcaccaccacaggttcaggctgccattgcgccggcttcttcctcttgtgtcatgtccagggagctcgccgccaccaagatccagaccgccttccgaggtcacctggcaagaagggcgctgcgggcattgaaaggcctggtcagactcaagtcgctggtccaaggccactccgtcaagcgccaggccaccagcacgcttcgctgcatgcagactctgtcccgggtccagtccaagatacggacgaggaggatcaagatggccgaggagaaccaggcccttcagcgccagctcttgttgaaccaggaactagagactctcaggatgggagatcagtggaataccagcctgcagtccaaggagcaaatcgaggcgagcctcgtgagcaggcaagaggccgcggctagaagagaacgggctctcgcatacgcattctcccaccagtggaagagcacctcaaggtctgccaacccgatgttcgtggacccgagtaacccgcactggggctggagctggctggagcggtggatggcgtcgaggccgttcgacggccgcaacggggcgtccgagaaggagggcagcagcgtcgaccgcacgtcggtgcacagcaccagcctgagcatgaacctcggagaaggtgagacggtcacaaaggcggacaaccaggtggtggactctttgaagccgaatgatgataagccgccgccgctttcgactccgaagccgtccggccctgcccccaggcagtccccgtcgacgccctcgccggcgctggcgaggaagaagagcgcgacgcccaagagtggagactgcgacggcgacgacgcgaggagcgtggtcagcactgtccggtccgagcggccccggaggcacagcatcggcgcgtccagcgtgcgtgacgacgcgggctcttccccgtcggtgccgagctacatggcggccaccaagtcggcgtcggccagggccaagtcgcgtgtgcagagcccgacgctgaccgagggtgctgctcaagctgagacgctggagaaaggatggtcttctgtgggttcagcgaagaagcggctgtcctttccggctgggacgccaccgccggtgccggcggcggcggcgaggcggcactccgggcctcccaaggtgcggcaggcgggcgtggaaggtggtacggaggaacgggactcgtcccttgcgtgacatcatgggaagcagattatggtgtggagcagagcagagcggaatttgttgcatttgttgagtgaaaggaacgcagaatgtgtgttgtgtggatccattggatttgatttgatttgtatgatggcagtattcctatttgattattcattgaataatataagtatctgtaatgaagataaaaggaggggacacgaacattatttc

SEQ ID NO: 985 - protein, 378 aa, Triticum aestivum
  misc_feature: Ceres CLONE ID no.826796
  misc_feature: Bit score of 469.0 for HMM based on sequences of FIGURE 16.
  misc_feature (4)..(24): Pfam Name: IQ Pfam Description: IQ calmodulin-binding motif
  misc_feature: Functional Homolog Of Ceres SEEDLINE ID no. ME24091 at SEQ ID NO. 922
MSRELAATKIQTAFRGHLARRALRALKGLVRLKSLVQGHSVKRQATSTLRCMQTLSRVQSKIRTRRIKMAEENQALQRQLLLNQELETLRMGDQWNTSLQSKEQIEASLVSRQEAAARRERALAYAFSHQWKSTSRSANPMFVDPSNPHWGWSWLERWMASRPFDGRNGASEKEGSSVDRTSVHSTSLSMNLGEGETVTKADNQVVDSLKPNDDKPPPLSTPKPSGPAPRQSPSTPSPALARKKSATPKSGDCDGDDARSVVSTVRSERPRRHSIGASSVRDDAGSSPSVPSYMAATKSASARAKSRVQSPTLTEGAAQAETLEKGWSSVGSAKKRLSFPAGTPPPVPAAAARRHSGPPKVRQAGVEGGTEERDSSLA

SEQ ID NO: 986 - DNA, 1806 bp, Zea mays
  misc_feature: Ceres CLONE ID no.228069
  misc_feature: Encodes the peptide sequence at SEQ ID NO. 987
gagccgcggaggagcagcggcgcatcgcaacactaaccaaagtcctcctctccaggtgccgagccagggtgactgttccgaggagcgtggcgtggacccatggggaagaagggcaagtggttcggtgccgtcaagaaggtcttcagccccgaatccaaggagaagaaagaggagaggctaaggaggaaatcagcagctagcaacccagcaccggtagatctgaccccatctacctccctggaagtcaatgtttcggtgccaccccctccggctcctcctccagttcctcgccagaccgacgaggtcagggtccccgaagccgagcaggagcagagcaagcatgtcaccctggaggaggcccctgctgctgctgctgccccagcacaggcgtcggtgctgccacctggtgcgccaaccgaagagctcgccgcaatcaagatccagaccgccttccgaggttacctggcaaggagggcactaagagcactacgaggccttgtacgattgaagtcattggttgagggtaattcagttaagcgtcaatctgcaagcactctgcgctgtatgcaaactctatcgcgggtgcagtcacaaatacgatctaggagagcaaagatgtccgaggagaaccaggccctccaacgccagctcctacttaaacaggaactggagaatttcagaatgggtgagaactgggacgacagcactcaatccaaggagcaaatcgaggcaagcctaataagcaggcaagaggcagcgataagaagagaaagagctcttgcatatgcattttcacatcagtggaagagcacatcaagatctgcgaacccaatgtttgtagacccaaataacttgcagtggggctggagctggttggagcgctggatggcagcaaaaccttgggagggacgcaatgggaccgacaaggagagcaacattgatcgcggctccgtcaagaatatgagcttgaaccttggagttggagagggtgagatcacaaaagctttcaaccgccgggactcaaagccagagaagccatcaccaccgactccaaaaccggcccgtccagcttccaggcaatccccttcgacgccctctgctagagtggccccaatacctgcgaggaggaaatccagcacgccaaagaatgggctttcacaggtggacgatgacgtgaggagcgtgctcagtgtgcagtctgagcgaccaaggaggcacagcatagccacgacgtcgaccatgcgggacgatgagagcctcgcgagctccccgtcgctcccgagctacatggttcccacagaatctgcgagggccaaatctcgcacagcaacggccaatggcgcagagacgcctgagaaaggaggctctgctggaccagtcaagaagaggttgtctttccaaggtggagctgcggctgcctcaccgatgcgacggcattctggccctcccaaggtggagagcgctgtgaaggacattgctgcgccaccacagcctgaggccttggtagccaatggtggtggaagcaagtgacttgtattgacaagttccaggatgggggagcgggttatggtcttatggagggacatgtttcatccgtgaacagaagttaagagtggtgccggatctacgaatggtttgaattgttttcccgttacaaccacattgtttgctgtataagattcactgtacctgccagttggttccatttgttgttttctgtaaaacaaacatcaatttgtcactagaatctgtgatgcttgtatgtaaacaggtcctctatttatgtgagccatatatttcattttc

SEQ ID NO: 987 - protein, 476 aa, Zea mays
  misc_feature: Ceres CLONE ID no.228069
  misc_feature: Bit score of 1140.1 for HMM based on sequences of FIGURE 16.
  misc_feature (108)..(128): Pfam Name: IQ Pfam Description: IQ calmodulin-binding motif
  misc_feature: Functional Homolog Of Ceres SEEDLINE ID no. ME24091 at SEQ ID NO. 922
MGKKGKWFGAVKKVFSPESKEKKEERLRRKSAASNPAPVDLTPSTSLEVNVSVPPPPAPPPVPRQTDEVRVPEAEQEQSKHVTLEEAPAAAAAPAQASVLPPGAPTEELAAIKIQTAFRGYLARRALRALRGLVRLKSLVEGNSVKRQSASTLRCMQTLSRVQSQIRSRRAKMSEENQALQRQLLLKQELENFRMGENWDDSTQSKEQIEASLISRQEAAIRRERALAYAFSHQWKSTSRSANPMFVDPNNLQWGWSWLERWMAAKPWEGRNGTDKESNIDRGSVKNMSLNLGVGEGEITKAFNRRDSKPEKPSPPTPKPARPASRQSPSTPSARVAPIPARRKSSTPKNGLSQVDDDVRSVLSVQSERPRRHSIATTSTMRDDESLASSPSLPSYMVPTESARAKSRTATANGAETPEKGGSAGPVKKRLSFQGGAAAASPMRRHSGPPKVESAVKDIAAPPQPEALVANGGGSK

SEQ ID NO: 988 - DNA, 2117 bp, Panicum virgatum
  misc_feature: Ceres Clone ID no. 1806867
  misc_feature: Encodes the peptide sequence at SEQ ID NO. 989
gtcactctcgccactgctcccagctgttgcgacttgcgacctccgatcatccaaggctcctgcacccctgtcagtcctagctccagccaaaaatcgttggcttccgctgcctgctcctccgccttgcacctcccatgaccttccacgcgacatgattgcattgcaggcccctgcggagctcagtgtcctcccacgccgctgacgccttcttgttgcctccccgctgctgcgcacaaccgaaagggccttcctctcttcctttgcttccgcggaaagatttggcgatttgttcatctactaaagttgcatctctcttgtgcgtgtttgccaccgtggtcttgttatcatcgtccaacgttgggtcgtctgatagatatagatctgggccatctggtgatttgcttgttcctcttcagggtgattgtttcgaggagtgtggagtggagccatggggaagaagggcaagtggttcggcgcggtcaagaaagtgttcagccctgaatccaaggagaagaaggaggagaggcagaggaggaaatcagcagctagcaaccctactccacgagatctgaccccgtcgacctccttggaagtcaatgtttcggtgccaccccctccagctcctccggcccttcaccagattgaggaaatcagggcccctgaagctgagcaggagcagagcaagcacgtcaccgtagaggaggctcctgctgcccctgcacaggcgtcggtgctgccacctggtgtgccaagtgaagagcttgctgcaatcaagattcagactgccttccgaggttacctggcaaggagggcactgcgagcgctgcggggccttgttcgattgaaatcattggttgagggtgattcagttaggcgtcaatctgcaagcactcttcgctgtatgcagactctatcgcgggtgcagtcacaaatacgttctaggagagcaaagatgtctgaggagaaccaggcccttcagcgccagctcctactgaagcaggaactggagaatttcaggatgggtgagaactgggatgacagcactcaatccaaagagcaaatcgaggcaagcctaataagcaggcaagaggcagcgattagaagagaaagagcgcttgcatatgcattttcacatcagtggaagagcacttcgagatctgtcaacccaatgtttgtagacccaaacaacttgcagtggggctggagctggttggagcgctggatggctgcaaaaccttgggagggctgcaatggggctgataaggagagcaacattgaccgtggatctgttaagagcatgagcttgaaccttggagagggtgagatcacaaaagctttcaaccgccgggactcaaagccagaaaagccatcaccgccaactccaaaactgacccgtccagcctccaggcaatccccttcgacgccctctgctaaagtagcgccaatacctgctaggagaaaatccgccacgccaaagaatgggctttcacatgtggatgacgatgcgagaagtgtgttcagcgtgcagtctgagcgaccaaggaggcacagtatagccacctcgactgtgcaggacaatgagagtctcgcaagctccccatcactcccaagttacatggttcccacagaatctgcaagggcgaagtctcgtctccagggatcagcattgactaatggtgcagagacaccggagaaaggaagctctgctggaccggtcaagaaaaggttgtcatttcaaggtggaacagcggctgcctcaccaatgcgacggcattctggtcctcccaaggtggacagtgtgatgaaggatattgttgccccaccacagccagaggccttggtgatcaatggtggaagcaagtgactcataccaggaggggaaagcggattatgaatatatattttatcgatgaagaaaggttaacgtgatatcagctcaatgagtgatttgaattgttttcttacgaccacattgtttgctctataagattcgcagtacctgccagttgattccattcgttgtttctgtaaaacaagtatcggttcgtcactagaatcaatgaagtttgtatgtaaacaggtcttctatttatgtgagccatatatttcttcttccg

SEQ ID NO: 989 - protein, 471 aa, Panicum virgatum
  misc_feature: Ceres Clone ID no. 1806867
  misc_feature (1)..(471): Bit score of 1130.7 for hmm based on sequences of FIGURE 16.
  misc_feature (104)..(124): Pfam Name: IQ Pfam Description: IQ calmodulin-binding motif
  misc_feature: Functional Homolog Of SEQ ID NO. 922
MGKKGKWFGAVKKVFSPESKEKKEERQRRKSAASNPTPRDLTPSTSLEVNVSVPPPPAPPALHQIEEIRAPEAEQEQSKHVTVEEAPAAPAQASVLPPGVPSEELAAIKIQTAFRGYLARRALRALRGLVRLKSLVEGDSVRRQSASTLRCMQTLSRVQSQIRSRRAKMSEENQALQRQLLLKQELENFRMGENWDDSTQSKEQIEASLISRQEAAIRRERALAYAFSHQWKSTSRSVNPMFVDPNNLQWGWSWLERWMAAKPWEGCNGADKESNIDRGSVKSMSLNLGEGEITKAFNRRDSKPEKPSPPTPKLTRPASRQSPSTPSAKVAPIPARRKSATPKNGLSHVDDDARSVFSVQSERPRRHSIATSTVQDNESLASSPSLPSYMVPTESARAKSRLQGSALTNGAETPEKGSSAGPVKKRLSFQGGTAAASPMRRHSGPPKVDSVMKDIVAPPQPEALVINGGSK

SEQ ID NO: 990 - DNA, 2233 bp, Panicum virgatum
  misc_feature: Ceres Clone ID no. 1883040
  misc_feature: Encodes the peptide sequence at SEQ ID NO. 991
gagaaaaaaggttgggctgcttgcccttcctttgctttttggtactttctttccgtctccggtttatttttccttcgtcctggatgcgctggtcgcgggtttgatctgaccaagacgtagaggcggtggtagaggtccgtggggtgggcggtggcttgctagagttaggtccttggcgcattcaggcgggtgaggaaggtgaggggctcagggctttcggtggttgcttgcttgcttgcttgctttgcctttctcgcggtaaaatcggatcttttggggttttgcgcgccgctatttgattcttcttggctggcttcgcctgcgcctttgttttggggttttgctgggttggtttcttcgcgattgtggtcgagggcggtgcggcgggtgcctcaggcacagctgcgagggtttctctgggtctggggcaacatccactcttcccgtttgtgattcgaccttctggcttgccgccgagacattgaagacacagtaatagaacacaaaaaatgggtaaaaagggaaagtggtttagtgctgtcaagaaagtcttcggctcctctgatccagatggaaaggaagcaaaggttgagaaggcggataagtcaaaatccaggaggagatggccatttggaaagtcgaggcactctgatccttctacctcaatggtgtcagggactgctccagtagctccgttgcctccgccaccaccaatacaacttactcagccacactcccaggagattaaagatgtcaagccagttgaaacagacagtgagcagaacaagcatgcatactctgttgcccttgcatccgctgttgctgctgaagctgatgcagttgctgcccaggccgctgctgaggttgtgcgcctcacagcagttaccacggcagcaccaaaaatgcctgtaacttcaagggaagaacttgccgccatcaagattcagactgccttcaggggttatctggcaaggagagcattgcgggcactaagagggctagttagattgaagtcacttgtcgatggaaatgctgtcaagcgccaaacttctcacactttgcattgcacacaaacgatgacaagagttcaaactcaaatctactctagaagggtgaagttggaggaggaaaaacaagctcttcaaaggcagctccaattgaaacatcaaagggaacttgagaaaatgaagattgaagaagactgggatcacagccatcaatccaaagaacaaattgaggccagcctagttatgaaacaagaagctgcactaaaacgagaaagagcacttgcatatgcattttctcaccagtggagaaattctggtcgaactataaccccaactttcacagaacctgggaatcctaactggggctggagctggatggaacgctggatgacagcaagaccttgggagagccgattggcagcatcagacaaggataataaagagcgttctctgacaaagaattccagcagcagtgctgttcgaatgtctgtaccccgtgccatctcaatccagaggccagcaacaccaaacaagtcaagccgtccaccaagccggcagtcaccttcaacaccgccatcgaaggcaccatctacctcaggaaagaccaggccagcaagtccaaggggcagctggctgtacaaggaagatgacctgaggagcatcacaagcatacgctctgaacgcccaaggaggcaaagcataggcggaggctcggtccgggatgatgcaagcctgactagcacaccacctctccccagttatatgcagtcgacagagtctgcgagggcaaagtctcgataccgcagcttgttgactgaaaagcttgaggtttcagagagggcacctctggcccattcggttgttaagaagcgcctctccttccctgtcatcgacaaaccgagcagtccaccggcagataagacaaaggaaagagcgaggcgccattcagaccctccgaaggttgatcctgcaatgctgaaggatgcccctgttgcctgatcaggcccttgtgattgttaggtttcgtgctgttttaactccatgatgtattttctatgttagattgttttctctgcgtaatgtctaatctgtccgggttgatttgagaattgaggcaattctaactgtatttgctgtcatggttttctccctgtagattgatacgtgtgattctaatagtgtatgcccttggctttcaatgtacgatataacggtttttgacagac

SEQ ID NO: 991 - protein, 498 aa, Panicum virgatum
  misc_feature: Ceres Clone ID no. 1883040
  misc_feature (1)..(498): Bit score of 578.4 for hmm based on sequences of FIGURE 16.
  misc_feature (139)..(159): Pfam Name: IQ Pfam Description: IQ calmodulin-binding motif
  misc_feature: Functional Homolog Of SEQ ID NO. 922
MGKKGKWFSAVKKVFGSSDPDGKEAKVEKADKSKSRRRWPFGKSRHSDPSTSMVSGTAPVAPLPPPPPIQLTQPHSQEIKDVKPVETDSEQNKHAYSVALASAVAAEADAVAAQAAAEVVRLTAVTTAAPKMPVTSREELAAIKIQTAFRGYLARRALRALRGLVRLKSLVDGNAVKRQTSHTLHCTQTMTRVQTQIYSRRVKLEEEKQALQRQLQLKHQRELEKMKIEEDWDHSHQSKEQIEASLVMKQEAALKRERALAYAFSHQWRNSGRTITPTFTEPGNPNWGWSWMERWMTARPWESRLAASDKDNKERSLTKNSSSSAVRMSVPRAISIQRPATPNKSSRPPSRQSPSTPPSKAPSTSGKTRPASPRGSWLYKEDDLRSITSIRSERPRRQSIGGGSVRDDASLTSTPPLPSYMQSTESARAKSRYRSLLTEKLEVSERAPLAHSVVKKRLSFPVIDKPSSPPADKTKERARRHSDPPKVDPAMLKDAPVA

SEQ ID NO: 992 - DNA, 1593 bp, Panicum virgatum
  misc_feature: Ceres CLONE ID no.1769872
  misc_feature: Encodes the peptide sequence at SEQ ID NO. 993
aaagcggaggcgaaagcgaaggggagtgggagggcagcggtcggctggtcgggccggcggcgacggtgacgcctcgctcgctgcggccctacgcattccgcgcaggtgctagctgttgaactcgcacccaaaaaaaaaaagagctatcatggggatttcagctaagtggataaaatcacttgttgggctaagaaagcatgaaaaggggcgaaacgctgaaagcagcgccgggaggagctctggtgcccagttgctacacacacaggatcattctgtagatacagaaggtgctcttgcagctgaagaactcagagtacaagctgaaccattggctgctgaagcaaacacagagacaatatcaaattccccttcctcaccaagcacatcttttcaagtttctcagactgaacatggtacaaaggagtaccaggctgctgtggttattcagtccacctttcgagcattcctggcaaggcgtgctttacgagcgttaaaagggctagttagactccaggcacttgtaagaggtcatgctgtaagaaagcaagcagcagaaacacttcagtgcatgcaagcgctggtgagagctcaaactcgtgtgagagcaagacgagtccgtgtttctttggaaagccaagggacccaaaagaaacctcctgaaaagaatgctcatgaggaccatgttcgagatattgaggaagactggtgtggtagtataggttcagtagaagaaattaaagctaaggcgttaaaaaggcaagaagctgcagctaagcgggaaagggcgatggcttatgctttaacccatcagtggcaaacaggttcgaggaaacagaaagcagcgagcctccaagaccaaggacttgcaggggacgaaaatcagtgggggcgaaactggttagaaaggtggatggctgcacgcccatgggagaacaggttacttgacagtaatgccaaagaaagtgtcacagttggtgatgacaaacctgctgaggaagacaaggctaaagctctgaacaaaccgaagggaaaagtacctgtttcaaccacacaatcaaatggatcgcggcagaagaaagtcacaggccacaagaagtcacattctgatgtaagtggctcttcatcggggcagtctgcaagtgtgcaaccaactgcttctttggagtcatccaagatcaaagagaagccatcagatgaaatcactgatgaagtcagctctcaaccttcgaaattggcttcccgatccacgagcaatccaaaagaaaggccagcacaaatcaatgcaccagcgaagaagcgattatcccttcctaacaatgcaacagccaacgggggtgtaggaaagcgccatgccaacagtagccggacaacccaggccacgagatcgaagaatgcagtgaaaggagcctccaaatctgaatcaagagagcagtcgaagccttctagcacaaccgtgaagccagttgaggcacaagcctgagaccaaaccactcccatttcattcagaccattggtgatgcccctttgtcatgcgtgctgctggaatatttttttatttttaatcttttttttaataatattttaagtttaacc

SEQ ID NO: 993 - protein, 443 aa, Panicum virgatum
  misc_feature: Ceres CLONE ID no.1769872
  misc_feature: Bit score of 51.8 for HMM based on sequences of FIGURE 16.
  misc_feature (93)..(113): Pfam Name: IQ Pfam Description: IQ calmodulin-binding motif
  misc_feature: Functional Homolog Of Ceres SEEDLINE ID no. ME24091 at SEQ ID NO. 922
MGISAKWIKSLVGLRKHEKGRNAESSAGRSSGAQLLHTQDHSVDTEGALAAEELRVQAEPLAAEANTETISNSPSSPSTSFQVSQTEHGTKEYQAAVVIQSTFRAFLARRALRALKGLVRLQALVRGHAVRKQAAETLQCMQALVRAQTRVRARRVRVSLESQGTQKKPPEKNAHEDHVRDIEEDWCGSIGSVEEIKAKALKRQEAAAKRERAMAYALTHQWQTGSRKQKAASLQDQGLAGDENQWGRNWLERWMAARPWENRLLDSNAKESVTVGDDKPAEEDKAKALNKPKGKVPVSTTQSNGSRQKKVTGHKKSHSDVSGSSSGQSASVQPTASLESSKIKEKPSDEITDEVSSQPSKLASRSTSNPKERPAQINAPAKKRLSLPNNATANGGVGKRHANSSRTTQATRSKNAVKGASKSESREQSKPSSTTVKPVEAQA

SEQ ID NO: 994 - protein, 500 aa, Oryza sativa subsp. indica
  misc_feature: Public GI ID no.125550655
  misc_feature: Bit score of 1135.6 for HMM based on sequences of FIGURE 16.
  misc_feature (107)..(121): Pfam Name: IQ Pfam Description: IQ calmodulin-binding motif
  misc_feature: Functional Homolog Of Ceres SEEDLINE ID no. ME24091 at SEQ ID NO. 922
MGKKGKWFGAVKKVFSPESKEKKEERLRRKLAASNPNPPDLTPSASLEVNVSVPPPPPPPPVQQIEEVKVPEVEQEQSKHVTVEAVPEAVPVPAQTSSLPPGVSREEQAAIKIQTAFRGYLLSENSSWLFISSAAFIYHCVGANITKARRALRALRGLVRLKSLVEGNSVKRQAASTLRCMQTLARVQSQIRSRRLKMSEENQALQRQLLLKQELESLRMGEQWDDSTQSKEQIEASLISRQEAAVRRERALAYAFSHQWKSTSRSVNPMFVDPNNPQWGWSWLERWMAAKPWEGRAGTDKESNLDRASAKSASLNLGEGEITKAFNRRGSKPDKSSPTTPKLTRPASRQSPSTPSAKVSPIFAKKKSATPKNGLSQVDDDAKSVFSVQSERPRRHSIATSTVRDDESLASSPSVPSYMAPTKSARAKLRLQGSAVTDGAETPPEKVASVGSVKKKLSFQAGMVPPSPMRRHSGPPKVEVVKDIAEPPQPEALVINGGSK

SEQ ID NO: 995 - protein, 474 aa, Oryza sativa subsp. japonica
  misc_feature: Public GI ID no.54306075
  misc_feature: Bit score of 1173.0 for HMM based on sequences of FIGURE 16.
  misc_feature (107)..(127): Pfam Name: IQ Pfam Description: IQ calmodulin-binding motif
  misc_feature: Functional Homolog Of Ceres SEEDLINE ID no. ME24091 at SEQ ID NO. 922
MGKKGKWFGAVKKVFSPESKEKKEERLRRKLAASNPNPPDLTPSASLEVNVSVPPPPPPPPVQQIEEVKVPEVEQEQSKHVTVEAVPEAVPVPAQTSSLPPGVSREEQATIKIQTAFRGYLARRALRALRGLVRLKSLVEGNSVKRQAASTLRCMQTLARVQSQIRSRRLKMSEENQALQRQLLLKQELESLRMGEQWDDSTQSKEQIEASLISRQEAAVRRERALAYAFSHQWKSTSRSVNPMFVDPNNPQWGWSWLERWMAAKPWEGRAGTDKESNLDRASAKSASLNLGEGEITKAFNRRGSKPDKSSPTTPKLTRPASRQSPSTPSAKVSPIFAKKKSATPKNGLSQVDDDAKSVFSVQSERPRRHSIATSTVRDDESLASSPSVPSYMAPTKSARAKLRLQGSAVTDGAETPPEKVASVGSVKKKLSFQAGMAPPSPMRRHSGPPKVEVVKDIAEPPQPEALVINGGSK

SEQ ID NO: 996 - protein, 500 aa, Oryza sativa subsp. japonica
  misc_feature: Public GI ID no.125592647
  misc_feature: Bit score of 1139.1 for HMM based on sequences of FIGURE 16.
  misc_feature (107)..(127): Pfam Name: IQ Pfam Description: IQ calmodulin-binding motif
  misc_feature: Functional Homolog Of Ceres SEEDLINE ID no. ME24091 at SEQ ID NO. 922
MGKKGKWFGAVKKVFSPESKEKKEERLRRKLAASNPNPPDLTPSASLEVNVSVPPPPPPPPVQQIEEVKVPEVEQEQSKHVTVEAVPEAVPVPAQTSSLPPGVSREEQATIKIQTAFRGYLLSENSSWLFISSAAFIYHCVGANITKARRALRALRGLVRLKSLVEGNSVKRQAASTLRCMQTLARVQSQIRSRRLKMSEENQALQRQLLLKQELESLRMGEQWDDSTQSKEQIEASLISRQEAAVRRERALAYAFSHQWKSTSRSVNPMFVDPNNPQWGWSWLERWMAAKPWEGRAGTDKESNLDRASAKSASLNLGEGEITKAFNRRGSKPDKSSPTTPKLTRPASRQSPSTPSAKVSPIFAKKKSATPKNGLSQVDDDAKSVFSVQSERPRRHSIATSTVRDDESLASSPSVPSYMAPTKSARAKLRLQGSAVTDGAETPPEKVASVGSVKKKLSFQAGMAPPSPMRRHSGPPKVEVVKDIAEPPQPEALVINGGSK

SEQ ID NO: 997 - DNA, 1698 bp, Arabidopsis thaliana
  misc_feature: Ceres Annot ID no. 555419
  misc_feature: Encodes the peptide sequence at SEQ ID NO. 998
atgcccttatcctttgaaaggtttcaaggggagggggtgtttggtttatcttcttcttctttctattcagattctcagaaaatctggtccaatcaagacaaaaccgaagcaaaacaagaagatcttggttatgttgtcggtggttttttaccggagccgacgtctgttctcgacgctctaagaagtcctagtcctctcgcttcttattcttctaccaccaccacgctgtcttcctctcacggcggcggtggtaccaccgtcaccaacaccaccgtaaccgccggtgatgataacaataacaataaatgtagtcagatgggtttggatgatcttgacggtgttctctctgcttcttctcctggtcaagagcagagtatcttgagacttatcatggacccgggttctgccttcggtgttttcgacccgggtttcggattcgggtctggttccgggcctgtgtctgctccggtgagtgataattcgaatcttctgtgtaacttcccgtttcaagagattacgaatccagcagaagctttgatcaatccttcaaatcattgcctgttctataatcctccgttatctccaccgctgttcaacgcggcggagctaatcggaaccaccggaaacaacaacggcgaccacaccgttctcgcgcaagggatattggcgcggctcaatcaccatctcaacactagtagtaaccacaagtctccgtttcaaagagcagcttctcacatcgctgaagctctcctctcactcatccacaacgaatcatcaccaccgttaatcacgccggagaatctgattctccgaatcgccgcttacagatccttctccgaaacctcgccgtttctccaattcgttaacttcacagcgaatcaatcgattcttgagtcctgcaacgaatcagggtttgatcggatccacattatcgatttcgacgttggatatggaggacaatggtcgtctctaatgcaagaactcgcttccggagttggaggaagaagaagaaacagagcatcgtctctgaaattaacagtctttgctcctccaccttctacagtctccgacgagttcgagcttcgtttcacagaggaaaatctcaaaacattcgccggagaagtcaagattcctttcgaaatcgagttactaagcgtagagcttcttctaaacccagcttattggccactctctctacgttcatcggaaaaagaagcaatcgcagtgaatcttccagtaaactccgtcgcctccggttaccttccgttaatcctccgattccttaaacaactatcaccaaacatcgtcgtttgctcagacagaggatgtgaccgtaacgacgcgccgtttccaaacgcagtgattcattcgcttcaataccacacttctctgcttgagtctcttgatgctaatcagaaccaggacgattcgagtatcgagaggttttgggttcaaccatcgatagagaagctgttgatgaaacgacaccgttggattgaaagatctccaccgtggagaatcttgtttacacaatgtgggttttctccggcgagtttgagtcagatggcggaagctcaggcggagtgtttgttgcagagaaatccggtgagagggtttcacgttgagaaaaggcagtcttcacttgtcatgtgttggcaaaggaaagaacttgttactgtctctgcttggaaatgttag

SEQ ID NO: 998 - protein, 565 aa, Arabidopsis thaliana
  misc_feature: Ceres Annot ID no. 555419
  misc_feature (1)..(565): Bit score of 574.9 for hmm based on sequences of FIGURE 6.
  misc_feature (167)..(477): Pfam Name: GRAS Pfam Description: GRAS family transcription factor
  misc_feature: Functional Homolog Of SEQ ID NO. 149
MPLSFERFQGEGVFGLSSSSFYSDSQKIWSNQDKTEAKQEDLGYVVGGFLPEPTSVLDALRSPSPLASYSSTTTTLSSSHGGGGTTVTNTTVTAGDDNNNNKCSQMGLDDLDGVLSASSPGQEQSILRLIMDPGSAFGVFDPGFGFGSGSGPVSAPVSDNSNLLCNFPFQEITNPAEALINPSNHCLFYNPPLSPPLFNAAELIGTTGNNNGDHTVLAQGILARLNHHLNTSSNHKSPFQRAASHIAEALLSLIHNESSPPLITPENLILRIAAYRSFSETSPFLQFVNFTANQSILESCNESGFDRIHIIDFDVGYGGQWSSLMQELASGVGGRRRNRASSLKLTVFAPPPSTVSDEFELRFTEENLKTFAGEVKIPFEIELLSVELLLNPAYWPLSLRSSEKEAIAVNLPVNSVASGYLPLILRFLKQLSPNIVVCSDRGCDRNDAPFPNAVIHSLQYHTSLLESLDANQNQDDSSIERFWVQPSIEKLLMKRHRWIERSPPWRILFTQCGFSPASLSQMAEAQAECLLQRNPVRGFHVEKRQSSLVMCWQRKELVTVSAWKC

SEQ ID NO: 999 - DNA, 1548 bp, Sorghum bicolor
  misc_feature: Ceres Annot ID no. 8734484
  misc_feature: Encodes the peptide sequence at SEQ ID NO. 1000
atgtccgagctccaggacgacggcgccggcggaaatggccaagacgaaaccgcccccgccgccgccttcgcgtcgccggccaagcgcctccgcagcaggtcgccggcgtcggagcccacctccgtgctctacaaccgcagccccagcccgcccacgtcctcctccctggcctcttcctccgcgcccgagccgccccccatcagcgccgaggactgggagtgggaggccgtcctcgacatggccgcgccaccagccgccgcacggtctcaggacaccacctccttcctccgctggatcatggacgccgacgcccaagttgacgcctttgatcccttcctgcctccgccgccttgccaggagaccgccgccgtcgagcccttcttgcacccgcagctccagctcccgctcccgctccccgtggcgcaggaggaccttgaccttgagccaggggtggcggtggacgagctcctcgaggcggcgcgccgagccgacgccggggactccgctggcgcgcgcgagatattgacgcggctcaatcaccggcggctaccctcgatgtcgctgccggggcacccgcaccctcctctcctccgcgccgccgctcaccttcgggacgcgctcctgcgcctcctcgtcgcgctccccctcccgcacggctcctccgtctcgaccccgctcgacgtcgcgctcaaggtcgccgcacacagggcactggcggacgcgtcgccgaccgtccagttcgccagcttcacgtccacgcaggcgctcctcgacgtgctcggcgccgcgcgccgcgtgcacgtcgtcgacttggacgtcggcttcggcggtcggtgggcgccgctcatgcaggagctcgcgctccagtggcgccgagcacccgtctcgccgccgccgtgcttcaaggtgacggcattggtctcgccggggtcagcgcaccccttggagctccacctcacgcacgagggcctgacgcgcttcgccgccgagctcggcatctcgttcgagttcaacgccgtcgccttcgacccctcggacccgttgcccccaacggagttgtccgtcgcgcccggcgaggccgtcgccgttcacctccccatcggctccggtactccgttgccgacgactctccgcgtcgtgaagcagctccggcccgccatcgtggtgtgcgtcgacgaccacggatgccaccgcggcgacctgccgctgtcgcatcacgcgctcaacgtcgtgcgctccaccgcggcgttcctcgagtcgctggacgcggccggcgcgccggcggacgcggtggcgaggctggagcagtacgtcctgcgtcccagggtggagcgcctgttgctaggggacaggatgcctccatggcagaccatgcttgcgtccgccggattcgcgccggtgcagctcagcaacgccgccgaggcacaggccgagtgccttgtcagccgcacgcccacgccgggcttccatgtggagaagcggcaggcggcgcttgcactgcggtggcaggaatcggagctggtgatggtgtcggcgtggcggtgctga

SEQ ID NO: 1000 - protein, 515 aa, Sorghum bicolor
  misc_feature: Ceres Annot ID no. 8734484
  misc_feature (1)..(515): Bit score of 585.7 for hmm based on sequences of FIGURE 6.
  misc_feature (127)..(434): Pfam Name: GRAS Pfam Description: GRAS family transcription factor
  misc_feature: Functional Homolog Of SEQ ID NO. 149
MSELQDDGAGGNGQDETAPAAAFASPAKRLRSRSPASEPTSVLYNRSPSPPTSSSLASSSAPEPPPISAEDWEWEAVLDMAAPPAAARSQDTTSFLRWIMDADAQVDAFDPFLPPPPCQETAAVEPFLHPQLQLPLPLPVAQEDLDLEPGVAVDELLEAARRADAGDSAGAREILTRLNHRRLPSMSLPGHPHPPLLRAAAHLRDALLRLLVALPLPHGSSVSTPLDVALKVAAHRALADASPTVQFASFTSTQALLDVLGAARRVHVVDLDVGFGGRWAPLMQELALQWRRAPVSPPPCFKVTALVSPGSAHPLELHLTHEGLTRFAAELGISFEFNAVAFDPSDPLPPTELSVAPGEAVAVHLPIGSGTPLPTTLRVVKQLRPAIVVCVDDHGCHRGDLPLSHHALNVVRSTAAFLESLDAAGAPADAVARLEQYVLRPRVERLLLGDRMPPWQTMLASAGFAPVQLSNAAEAQAECLVSRTPTPGFHVEKRQAALALRWQESELVMVSAWRC

SEQ ID NO: 1001 - protein, 507 aa, Zea mays
  misc_feature: Public GI ID no. 194700774
  misc_feature (1)..(507): Bit score of 616.1 for hmm based on sequences of FIGURE 6.
  misc_feature (120)..(426): Pfam Name: GRAS Pfam Description: GRAS family transcription factor
  misc_feature: Functional Homolog Of SEQ ID NO. 149
MTSALPHMSELPDGGAGGNGQDEAAAFASPAKRLRRSPALEPTSVLYNRSPSPPTSSSLVSSAAPEPPPISAEDWEAVLSGGDMAAPPAAARSQDASFLRWIMDADAQVDAFDPFLPCQETAVVEPFLQPQLPLPVADDLEPGATVDELLEAVRRADAGDSTGAREILARLNHRLPSPPGHPHPPILRAAAHLRDALLRVLVTSAPAPAAVSTTPLDVALKVAAHRALADASPTVQFANFTSTQALLDALGTARRVHVVDLDVGFGGRWAPLMQELALQWRRAPVSPLPPPCLKVTALVSPGSSAHPLELHLTHQGLTRFAADLGISFEFNAVAFDPLDPLPPTGLSVAPGDAVAVHLSVGSGVPSAATLRVVKQLRPAVVVCVDHGCHRGDLPLSHHALSVVRSSAAFLESLDAAGAPADAVARLEEYVVRPRVERLLLGDRMPPWRTMLDSAGFAPVQLSNAAEAQAECLVRRTPTPGFHVEKRQAALALRWQDSELVMVSAWRC

SEQ ID NO: 1002 - DNA, 1607 bp, Zea mays
  misc_feature: Ceres Clone ID no. 447391
  misc_feature: Encodes the peptide sequence at SEQ ID NO. 1003
atgacaagcgcgctgccgcacatgtctgagctcccggacggcggcgccggcggaaatggccaagacgaagccgccgccttcgcctcgccggccaagcgcctccgtaggtcgccggcgctcgagcccacctccgtgctctacaaccgcagcccgagcccgcccacatcctcctccctggtctcctccgccgcgcccgagccgccccccatcagcgccgaggattgggaggccgtcctctccggcggcgacatggccgcgccaccagccgccgcgcggtctcaagacgcctctttcctccgctggatcatggacgccgacgcccaagtcgacgccttcgatcccttcctgccttgccaagagaccgccgtcgtcgagcccttcttgcagccgcagctcccgctccccgtggccgacgacctcgagccaggggcgacggttgacgagctcctcgaggcggtgcgccgcgccgacgccggggactccactggcgcgcgcgagatattggcgcggctcaatcaccggctcccctcaccgccggggcacccgcaccctccactcctccgcgccgcggctcacctccgggacgcgctcctgcgcgtcctcgtcacgtccgcgcccgcgcccgccgccgtctcgacgaccccgctcgacgtcgcgctcaaggtagccgcgcacagggccctggcggacgcgtcaccgaccgtccagttcgccaacttcacgtccacgcaggcgctcctcgacgcgctcggcaccgcgcgccgcgtgcacgtcgtcgacttggacgtcggcttcggcggccggtgggcgccgctcatgcaagagctcgcgctccagtggcgccgagcacccgtctcgccgctgccgccgccgtgcttgaaggtgacggccttggtctcgccagggtcatcagcgcaccccttggagctccacctcacgcaccagggcctgacgcgcttcgccgccgacctcggcatctcgttcgagttcaacgccgtcgcgttcgaccccttggacccgttgccccccacggggctgtccgtcgcgcccggcgatgccgtcgccgttcacctctccgtcggctccggggtcccgtcggcagctactctccgcgtcgtgaagcagctccgccccgccgtcgtggtgtgcgtcgaccacggatgccaccgcggcgacctgccgctgtcgcaccacgcgctgagcgtcgtgcgctccagcgcggcgttcctcgagtcgctggacgcggccggggcgccggcggacgcggtggcgaggctggaggagtacgtcgtgcgtcccagggtggagcgcctgttgctaggcgacaggatgcctccatggcggaccatgcttgactccgccggattcgcgccggtgcagctcagcaacgccgccgaggcacaggccgaatgcctcgtcaggcgcacgcccacgccgggcttccatgtggagaagcggcaggcggcgctcgcgctgcggtggcaggactcggagctggtgatggtgtcggcgtggcggtgctgaatcggggcactgggacagttcctgtaaagattgaacctttttctgttctcatgtgcagtaaaattagctagtaacttgttgtc

SEQ ID NO: 1003 - protein, 507 aa, Zea mays
  misc_feature: Ceres Clone ID no. 447391
  misc_feature (1)..(507): Bit score of 619.8 for hmm based on sequences of FIGURE 6.
  misc_feature (120)..(426): Pfam Name: GRAS Pfam Description: GRAS family transcription factor
  misc_feature: Functional Homolog Of SEQ ID NO. 149
MTSALPHMSELPDGGAGGNGQDEAAAFASPAKRLRRSPALEPTSVLYNRSPSPPTSSSLVSSAAPEPPPISAEDWEAVLSGGDMAAPPAAARSQDASFLRWIMDADAQVDAFDPFLPCQETAVVEPFLQPQLPLPVADDLEPGATVDELLEAVRRADAGDSTGAREILARLNHRLPSPPGHPHPPLLRAAAHLRDALLRVLVTSAPAPAAVSTTPLDVALKVAAHRALADASPTVQFANFTSTQALLDALGTARRVHVVDLDVGFGGRWAPLMQELALQWRRAPVSPLPPPCLKVTALVSPGSSAHPLELHLTHQGLTRFAADLGISFEFNAVAFDPLDPLPPTGLSVAPGDAVAVHLSVGSGVPSAATLRVVKQLRPAVVVCVDHGCHRGDLPLSHHALSVVRSSAAFLESLDAAGAPADAVARLEEYVVRPRVERLLLGDRMPPWRTMLDSAGFAPVQLSNAAEAQAECLVRRTPTPGFHVEKRQAALALRWQDSELVMVSAWRC

SEQ ID NO: 1004 - protein, 750 aa, Vitis vinifera
  misc_feature: Public GI ID no. 157349396
  misc_feature (1)..(750): Bit score of 1061.9 for hmm based on sequences of FIGURE 6.
  misc_feature (364)..(664): Pfam Name: GRAS Pfam Description: GRAS family transcription factor
  misc_feature: Functional Homolog Of SEQ ID NO. 149
MKDMPLPLELEGKGVFEICLNSLLEKWNKEEEEGGCCVGTEPTSVLDTRRSPSPPTSTSTLSSSCGGGGSDTAGVAAVSGNPSQKWPPAQPDTTSSNAGVELHPIPASVDLGAGEKCGLGMEDWESVLSETAASPSQEQSILRWIMGDVEDPSVGLNKLLQSGGGGPPDFEFSSGFGVVDQGFGFEPCLGSGSSMNAPCPGFPPTSNSVNSINHGRIGPVSNPNQPNFKIHNPQSNPNFAKSGNNLMPISFNQQQLQQQPFEALDEKPQILIPQVLINQHQAQHTQNPAFFLPLPYAQQEQNLLLPPQAKRHNTGPIGSIEQNCPVPKVPFSDSGQELFARRQQQQQQAQGFPQQLQLLPHHLQPRPAMGSKPKMVGEEMGHHQQYQQVIIDQLFKAAELVETGNTILAQGILARLNHQLSPIGKPFQRAAFYFKEALQLLLHSNSNNTNPLATSPHSSPFSLIFKIGAYKSFSEISPLIQFANFTCIQAILEALEGFDRIHIIDFDIGYGGQWASLMQELALRNGGAPSLKITAFASLSNHDQLELGLARENLNHFAGEINMAFELEILSLDSLNSLPLHLSENEAVAVNLPVGSFSNYPLPLPLVLRVVKQLSPKIMVSLDRGCDRTDLPYSHHILHAFQSYLALLESLDAVNVNSDALQKIERFLLQPGIEKIVLGRHRSPEKTPPWRALLLSSGFSPLTFSNFSESQAECLVKRTPVRGFHVEKRQSSLVLCWQRKDLISASAWRC

SEQ ID NO: 1005 - DNA, 1914 bp, Sorghum bicolor
  misc_feature: Ceres Annot ID no. 8639910
  misc_feature: Encodes the peptide sequence at SEQ ID NO. 1006
atgctctttgctggtagcgcacgagaagggcacgcggggacactgctgcagcagcaacagcaacgacaggggctcgccgccggcaaagtctccggcgccggcgacctctgggagcccacctcggtgcttgaccaccgacacagcccgagcccgagccctccgacctcggtttccacgctgtcgtcgcccctgggcgccgcgaccgccggtgtggcggccctcgccggtgccaacgccaagaacgtctccccgccgccggtggcggcggcatggccagggggagggcccggggaggaggccgtggcgggcggcaaggaggagtggcagctcacgccgctcgacatgggccttagcgccggcgaagggtgggacgccgccggcgccgtcctgtccgatggcgccgcgccgccgggactcgcccccgaccacaccttcctcaggtggatcattggcggcgaggacgcgtctgcggccatggggtctgtcatggacccgccggtccttgagctggaccacgcgccgtccatgatgtcgccggcgttcggggccagcatgccgttcgcgccggccatggaggacgtcaaggcggtgcctttcggccacacgcccaacttcctggtccaccatcaccagcaccacccccagccacacgccgccttcttcggctcgcactcccacgcatccctcgacgcggcgccgcagccgaagcgaccccaccccatggccggcgcgccggcgccaaagctgccatctttccctgggcccgtcgcccagccgggcgggttcgcgcccgctttgaagcccaaggcggaggcagctaacgacgaggcgaccgctgcggtggaccagcttgccgaggcggccaagcttgccgaggctggcgacgccttcggcgcccgcgagatattggcgcggctcaattatcggctccccgccgtcccaacggccgggacgccgctgctccgctcggccttctacttcaaggaggccctgcgcgtggcgctctccccaaccggcgaggccccggcggccccggtctccacgccgtacgacgtggtcctcaagctcggggcgtacaaggccttctcggaggtctcccccgtgctccagttcgcgcacctgacctgcgtgcaggcggtgttggacgagctcggcggcgccagccgcatccacgtgctcgacttcgacattggcatgggcgagcagtgggcgtcgctgatgcaggagctcgcgcagcgctgccccgcggcgacgctcaaggtgaccgcattggtgacatcggcgtcgcaccacccgctggagctgaacctgatccacgagaacctctccggcttcgcccgcgagctgggcgtcttcctccagttcgcggtgttcaacatcgacaccctggaccccgcggagctggtggccatcaccagcggcgacgccgtggccgtgcacctccccgtcgggtcggcccacgtggccgcaatgccggccgtgctccgcctcgtgaagcggctcggcgccaaggtggtggtctccgtggaccacggctgcgaccgcacggagctgccgttcgccacgcacctgttccaggcgttccagtcgtgcgtgtccctgctcgactccgtcgacgccgtgggcgcggacgcggaggcggtggccaggatcgagcggttcctggtccagcccgacgtggagctgcgcgtggtgtcgcgccaccgcgcgtcggcgccgccgccggcgtggcggaccgtgttcgcgtcggcggggttcgtgccggtgcaggccagcacgttcgccgagtcgcaggccgaggccctcctcaagaggatggcgctcatggggttccgcgtggagaagcgcggcggcgcgctctgcctctactggcagcgcggcgagctggtgtccgtgtcggcgtggcggtgctga

SEQ ID NO: 1006 - protein, 637 aa, Sorghum bicolor
  misc_feature: Ceres Annot ID no. 8639910
  misc_feature (1)..(637): Bit score of 1236.4 for hmm based on sequences of FIGURE 6.
  misc_feature (254)..(551): Pfam Name: GRAS Pfam Description: GRAS family transcription factor
  misc_feature: Functional Homolog Of SEQ ID NO. 149
MLFAGSAREGHAGTLLQQQQQRQGLAAGKVSGAGDLWEPTSVLDHRHSPSPSPPTSVSTLSSPLGAATAGVAALAGANAKNVSPPPVAAAWPGGGPGEEAVAGGKEEWQLTPLDMGLSAGEGWDAAGAVLSDGAAPPGLAPDHTFLRWIIGGEDASAAMGSVMDPPVLELDHAPSMMSPAFGASMPFAPAMEDVKAVPFGHTPNFLVHHHQHHPQPHAAFFGSHSHASLDAAPQPKRPHPMAGAPAPKLPSFPGPVAQPGGFAPALKPKAEAANDEATAAVDQLAEAAKLAEAGDAFGAREILARLNYRLPAVPTAGTPLLRSAFYFKEALRVALSPTGEAPAAPVSTPYDVVLKLGAYKAFSEVSPVLQFAHLTCVQAVLDELGGASRIHVLDFDIGMGEQWASLMQELAQRCPAATLKVTALVTSASHHPLELNLIHENLSGFARELGVFLQFAVFNIDTLDPAELVAITSGDAVAVHLPVGSAHVAAMPAVLRLVKRLGAKVVVSVDHGCDRTELPFATHLFQAFQSCVSLLDSVDAVGADAEAVARIERFLVQPDVELRVVSRHRASAPPPAWRTVFASAGFVPVQASTFAESQAEALLKRMALMGFRVEKRGGALCLYWQRGELVSVSAWRC

SEQ ID NO: 1007 - DNA, 1320 bp, Solanum lycopersicum
  misc_feature: Ceres Annot ID no. 8464611
  misc_feature: Encodes the peptide sequence at SEQ ID NO. 1008
atgactcctgctcctaccgatgaagaggaggagatgcttgttccgcgttcagatttggtatttgaaggacctcagcctatggaaggcttaggtcctaagcggacaatatcactattgggctgggctgtgacgtcacaagcagaaaccggcaatgatgtggaaaagcagccaccagaggatcctcaaacttcaaggtttacttggaagatagataacttctctaggttgaatgtaaagaaactatactctgacccttttgttgtcggtggctataaatggcggattttaatttttcccaaggggaacaatgttgattacctatccatgtatctggatgttgctgattcagctaatttaccttacgggtggagtagatatgcccagttcaacttgtcaattgttaaccaaattcataacaagtactccatcagaaaagagacacaacaccaattcaatgccagagaaagtgattggggtttcacatcctttatgccacttggtgaactatatgatccaaacaaaggttatcttgttgatgatacatgtgttgttgatgctgaggtagctgtgcgaaaaattgttgactattggtcgtatgactcaaaaatggaaactggctttgttggactgaagaaccaaggagctacctgttatatgaactcacttcttcaaactctctaccatattccttacttcaggaaggctgtataccacatgcctacaactgaaaatgatatgccctctgctagtatccctctagcgttgcaaagcttattctataagctccagtacagtgacaacagtgtagcaacaaaggagttgacaaaatcattcggatgggacacatatgattctttcttgcagcatgatgtgcaagaactcaatcgtgttctctgtgaaaagcttgaagaaaaaatgaagggtactgttgtggaaggcactatacagcagttattcgaagggcaccatatgaactatattgagtgcatcaatgtggactacaaatctacgagaaaggagtcattttatgatcttcagcttgatgtcaaagggtgtgctgatgtttatgcttcgtttgataaatatgttgaagttgaacgtcttgagggcgataacaagtaccatgccgaacaatatggtttgcaggatgctaagaagggtgtcttattcatggatttcccccctgtcctgcagcttcagttaaagcgctttgaatatgatttttcacgggacactatggtaaagcaatttaggattttctcatctaaaaagcaagccggtagcaagatatctttagttatatcgcaaaacagtttttag

SEQ ID NO: 1008 - protein, 439 aa, Solanum lycopersicum
  misc_feature: Ceres Annot ID no. 8464611
  misc_feature (1)..(439): Bit score of 844.1 for hmm based on sequences of FIGURE 10.
  misc_feature (70)..(190): Pfam Name: MATH Pfam Description: MATH domain
  misc_feature: Functional Homolog Of SEQ ID NO. 389
MTPAPTDEEEEMLVPRSDLVFEGPQPMEGLGPKRTISLLGWAVTSQAETGNDVEKQPPEDPQTSRFTWKIDNFSRLNVKKLYSDPFVVGGYKWRILIFPKGNNVDYLSMYLDVADSANLPYGWSRYAQFNLSIVNQIHNKYSIRKETQHQFNARESDWGFTSFMPLGELYDPNKGYLVDDTCVVDAEVAVRKIVDYWSYDSKMETGFVGLKNQGATCYMNSLLQTLYHIPYFRKAVYHMPTTENDMPSASIPLALQSLFYKLQYSDNSVATKELTKSFGWDTYDSFLQHDVQELNRVLCEKLEEKMKGTVVEGTIQQLFEGHHMNYIECINVDYKSTRKESFYDLQLDVKGCADVYASFDKYVEVERLEGDNKYHAEQYGLQDAKKGVLFMDFPPVLQLQLKRFEYDFSRDTMVKQFRIFSSKKQAGSKISLVISQNSF

SEQ ID NO: 1009 - DNA, 2151 bp, Sorghum bicolor
  misc_feature: Ceres Annot ID no. 8681439
  misc_feature: Encodes the peptide sequence at SEQ ID NO. 1010
atgagggcggcgctgttcggtgcccagcggaacggggctgcggacctcgtcggaggcgggaatacgctgttctggccggaggaggggaaggcgaaggtgctgctggagccgaggtccgtgctggactgcacacggagccccagccctaacaactcgacatcgacgctgtcgtcgtccctgggcggcggcggcggcgctgcggactcgaccggcggcgtggcggcggtttccgacagcagcgctgccgctaccgccgccgaagccaccaaatggggagcccccggcgagtacggcggcggcgggaaggaggactgggccggcggctgtgagctgccgccgattcctaccggcctcaacatggaggtcatcggcggcagcgacagctgggacgccatgctcggcagcgccgctgcggcggggcaggaccagacgttcttgaactggatcattggggccgccggcgacctggatcagtcagggccgccgctccccgtgcaccagcagccgctccttgacaatgtgggcttcgggttcccggcggcggaccccctgggtttctcgctcgatccccacctcggcggcgttgcctcggacatgtcgtcccctggtgcggtgtcgcacgctaccaacagcgctggcggtggcaacaaggcgtcctcggccttcggcctcttctcaccggagtctgcttcgctccagccgccgccgccaccggtgctgttccacgaaggtatcgacacaaagccccctcttcttggtgcgcagccgcccggcctcctccaccagtaccagcaccagccgacccccgccacaaccttcttcatgcccatcccctccttccccaaccacaatcagcagtcgccactcgttcaaccaccgcccaaacgtcatcaatccataggggatgacctctatctcgcccgaaatcggcttctgtctccgccggcggggcaaggtcacgcctttccaccactaaatggtcctgctccgttccagctccagccttcgccaccaccgccccacggggcgatgaagacgacggctgcggaggcagcgcagcagcagttgctggacgagcttgcggcggcggcaaaggccgctgaagccggcaattccattggcgcgcgagagatattggcgcggctcaatcaccagcttcccccgctcgggaagccgttcctccgctccgcctcctacctcaaggaggccctcctcctcgcgctcgccgaaggtcaccatggcggctgccacctcacatcaccgctcgacgttgccctcaagctcgcggcgtacaagactttctctgaccactcgcccgtgctccagttcaccaacttcaccgcaacgcaggcacttctcgacgaaattgccagcagcacatcgtcctgcatccatgtcatcgattttgatcttggcgttggaggccagtgggcttctttcttgcaggagcttgcacaccgccgtggagcaggtggtgcagctctgccgttcgtcaagctcactgcctttgtatcagctgcttcccaccatccactggaactgcgtcttgcgcgtgacaacattgcacagtttgctgcagaccttggaattccctttgggttcagtgctatcagtgctgatacgatcaaccctacagagctaatttctgccactggtgatgaagttgtagctgttgtcctcccggctggttgctctgctcgtgcaccaccactgccagcgatccttcggttggtgaaacagctggctcctaagatcgtgatagccatagaccatggcgctgatcgtgctgatcttcccttctcacagcacttcttgaattgctttcagtcttgcatgttcctccttgattcgcttgatgctgctggcattgatgctgattctgccggcaagattgagaagttcctgattcagccaagaattgaggattcagtgcttgggcggggcaaggtggacaagccaattgcatggagaagtgcatttgcaggtgctgggttcgcacctgttccgcccagcagtttggcggaggcacaggccgactgcctcctgaagcgggtgcaggtccgcggattccacgtggagaaatgtggcgtcgggctcacactatactggcagcgaggcgagcttgtcactgtatcagcatggcggtgctga

SEQ ID NO: 1010 - protein, 716 aa, Sorghum bicolor
  misc_feature: Ceres Annot ID no. 8681439
  misc_feature (1)..(716): Bit score of 1501.6 for hmm based on sequences of FIGURE 6.
  misc_feature (330)..(631): Pfam Name: GRAS Pfam Description: GRAS family transcription factor
  misc_feature: Functional Homolog Of SEQ ID NO. 149
MRAALFGAQRNGAADLVGGGNTLFWPEEGKAKVLLEPRSVLDCTRSPSPNNSTSTLSSSLGGGGGAADSTGGVAAVSDSSAAATAAEATKWGAPGEYGGGGKEDWAGGCELPPIPTGLNMEVIGGSDSWDAMLGSAAAAGQDQTFLNWIIGAAGDLDQSGPPLPVHQQPLLDNVGFGFPAADPLGFSLDPHLGGVASDMSSPGAVSHATNSAGGGNKASSAFGLFSPESASLQPPPPPVLFHEGIDTKPPLLGAQPPGLLHQYQHQPTPATTFFMPIPSFPNHNQQSPLVQPPPKRHQSIGDDLYLARNRLLSPPAGQGHAFPPLNGPAPFQLQPSPPPPHGAMKTTAAEAAQQQLLDELAAAAKAAEAGNSIGAREILARLNHQLPPLGKPFLRSASYLKEALLLALAEGHHGGCHLTSPLDVALKLAAYKTFSDHSPVLQFTNFTATQALLDEIASSTSSCIHVIDFDLGVGGQWASFLQELAHRRGAGGAALPFVKLTAFVSAASHHPLELRLARDNIAQFAADLGIPFGFSAISADTINPTELISATGDEVVAVVLPAGCSARAPPLPAILRLVKQLAPKIVIAIDHGADRADLPFSQHFLNCFQSCMFLLDSLDAAGIDADSAGKIEKFLIQPRIEDSVLGRGKVDKPIAWRSAFAGAGFAPVPPSSLAEAQADCLLKRVQVRGFHVEKCGVGLTLYWQRGELVTVSAWRC

SEQ ID NO: 1011 - protein, 177 aa, Chlamydomonas reinhardtii
  misc_feature: Public GI ID no. 159477973
  misc_feature (1)..(177): Bit score of 164.9 for hmm based on sequences of FIGURE 11.
  misc_feature (24)..(48): Pfam Name: zf-LSD1 Pfam Description: LSD1 zinc finger
  misc_feature: Functional Homolog Of SEQ ID NO. 316
MSVWMPPGGGSGSMAPPSQSHLVCGGCRCLLMYPQGASNVRCSRCGHITSAPASAGADSSQIVCNGCRVLLSYPRGAQSVQCSLCHAVTQVPVYGHLVCNGCSIMLMYPVGAQSVKCSVCHYVTPVTAATAAAGGASGSVPAARPKTKQTVVVENPPSYDEKGNEVANIAVGVKADT

SEQ ID NO: 1012 - protein, 243 aa, Picea sitchensis
  misc_feature: Public GI ID no. 116786199
  misc_feature (1)..(243): Bit score of 323.9 for hmm based on sequences of FIGURE 11.
  misc_feature (74)..(98): Pfam Name: zf-LSD1 Pfam Description: LSD1 zinc finger
  misc_feature: Functional Homolog Of SEQ ID NO. 316
MLSGGYSTRSDTTPVNNGSANGPIGSAPPRINSIQNNNPGAVRPGWGTMPLRMNPYPPQPMPLPPPNVQGQLVCNGCRTLLVYPQGAPNVCCAVCNAVTAVPPPGTEMAQLICGHCRTLLMYVRGATSVQCSCCTTVNLAMEANQVAHVNCGNCFTTLVYPYGAPSVKCAVCHYVTSVGQISNMRMPLPAQRPPAAATTAPASSSALPTRSQTQTVVVENPMTVDERGKMVSNVAVGVTTEKL

SEQ ID NO: 1013 - DNA, 1101 bp, Zea mays
  misc_feature: Ceres Clone ID no. 100931106
  misc_feature: Encodes the peptide sequence at SEQ ID NO. 1014
ccgatacggtgcctctcgcggtctcgctccccctcgcaggtcttttggtttttttagttcctccctttgcttcttggaggtgtttgttgccgtctcacccgcagttcttgagacatgcagagccagatagtgtgccacgggtgcaggacccttctgttctacccaagaggtgctccgagcgtgtgttgtgcggtatgccatgtggtcaccaatgtgccgcctccagcaatggagatggctcgacttatatgtggtggctgccagacattattgatgtatgctcgcagtgcaacaactgtaagatgctcatgttgtgacacagtcaatcttgtcagaccagtgagtagcatagctcatgtgaactgtggccagtgccaaacagtgttgatgtatccatacggagcaccgtctgtcaaatgtgctgtttgcaacttcattacaaatgttggcggggtgactcccatgatacctttgccaccaccagcactaactgcatcaagtggaacttcatatatcatcccgtcaatttccgtgccgacgaatcaaccgcggaatgtaactgttgtcgttgaaaacccaatgacagtagatgacaagggaaaattggtgagcaatgttgtagtrggggttacgagcggsgggaaaaagtgacggcatatcccaacccgtatagctttgtccaaactatttaaaaagggtttaagaatacatcccttgtatcatactgctgttgggcgatgggctgctggagggaggaatccccctcccgggagagggtaggggcaaggcagcgctgctttcgccactgcgatggtgttagaaggagccaaaaaaaaaaaaaggaagtgggggggggcatattcagagtatatttgtagcttgttaccccttgatttttttgtatgtaatatgggttctgcctgactttcactgtgtgatcaaatttccaagcccgtgggcgcggttgctgcgtgccttgttattagtgaataacaaacattgcaaatggttcttgaaatacagggggtgggtgttttaatctttctgcatttatgttaatcagcaggtgcccccatttgctgttccagactgataatgcag

SEQ ID NO: 1014 - protein, 178 aa, Zea mays
  misc_feature: Ceres Clone ID no. 100931106
  misc_feature (1)..(178): Bit score of 346.0 for hmm based on sequences of FIGURE 11.
  misc_feature (7)..(31): Pfam Name: zf-LSD1 Pfam Description: LSD1 zinc finger
  misc_feature: Functional Homolog Of SEQ ID NO. 316
  misc_feature (170)..(170): Xaa is any aa, unknown, or other
  misc_feature (175)..(175): Xaa is any aa, unknown, or other
MQSQIVCHGCRTLLFYPRGAPSVCCAVCHVVTNVPPPAMEMARLICGGCQTLLMYARSATTVRCSCCDTVNLVRPVSSIAHVNCGQCQTVLMYPYGAPSVKCAVCNFITNVGGVTPMIPLPPPALTASSGTSYIIPSISVPTNQPRNVTVVVENPMTVDDKGKLVSNVVXGVTSXGKK

SEQ ID NO: 1015 - protein, 171 aa, Vitis vinifera
  misc_feature: Public GI ID no. 157354198
  misc_feature (1)..(171): Bit score of 362.9 for hmm based on sequences of FIGURE 11.
  misc_feature (7)..(31): Pfam Name: zf-LSD1 Pfam Description: LSD1 zinc finger
  misc_feature: Functional Homolog Of SEQ ID NO. 316
MQSHLMCNGCRSILVYPRGATNVCCALCNSVTSVPPPGLEMAQLICGGCRTLLMYTRGATSVRCSCCHTVNLAPAPSNQVAHVNCGNCRTTLMYPYGAPSVKCAVCHYVTSVGMVNVRVPIPVHRPNAAAISASTPSTSSSQTVVVKNPMSVDESGKLVSNVVVGVTTEKK

SEQ ID NO: 1016 - protein, 309 aa, Zea mays
  misc_feature: Public GI ID no. 212723554
  misc_feature (1)..(309): Bit score of 349.7 for hmm based on sequences of FIGURE 11.
  misc_feature (138)..(162): Pfam Name: zf-LSD1 Pfam Description: LSD1 zinc finger
  misc_feature: Functional Homolog Of SEQ ID NO. 316
MFRCLAGWMRRVRRSVERSNRAGKLGRSVWGNRIAWMGFGIGREAGGCLFSPVPKLSVDDGDNRGRAKLIECLADVGLGGICWIANCSIWCTKNWTALGLGLGLGWDCFAFDCVYAYYVLIRCGFGRNFADMQSQIVCHGCRTLLFYPRGAPSVCCAVCHVVTNVPPPAMEMARLICGGCQTLLMYARSATTVRCSCCDTVNLVRPVSSIAHVNCGQCQTVLMYPYGAPSVKCAVCNFITNVGGVTPMIPLPPPALTASSGTSYIIPSISVPTNQPRNVTVVVENPMTVDDKGKLVSNVVVGVTSGGKK

SEQ ID NO: 1017 - protein, 179 aa, Hordeum vulgare subsp. vulgare
  misc_feature: Public GI ID no. 170780164
  misc_feature (1)..(179): Bit score of 393.1 for hmm based on sequences of FIGURE 11.
  misc_feature (7)..(31): Pfam Name: zf-LSD1 Pfam Description: LSD1 zinc finger
  misc_feature: Functional Homolog Of SEQ ID NO. 316
MQSQIVCHGCRSVLLYPRGAPSVCCAVCHAVTSAPPPGMEMAQLICVGCRTLLMYTRNATTVRCSCCDTVNLARPAPPVNSIAHVNCGQCQTVLMYPYGASSVKCAICNFITNIGMNTMRPLPATMHAPNGISYSVPSTSAPSTQSQNVTVVVENPMTVDDKGKLVSNVVVGVTTGGKK

SEQ ID NO: 1018 - protein, 177 aa, Hordeum vulgare subsp. vulgare
  misc_feature: Public GI ID no. 170780162
  misc_feature (1)..(177): Bit score of 343.6 for hmm based on sequences of FIGURE 11.
  misc_feature (7)..(31): Pfam Name: zf-LSD1 Pfam Description: LSD1 zinc finger
  misc_feature: Functional Homolog Of SEQ ID NO. 316
MQSQIVCHRCRRVLAYPSGAPSVCCAMCRAITAVPPPAPAVEMAQLICGGCRTLLMYTRNADTVRCSCCSTVNLVRPVNNIAHVNCGRCRTTLMYPHGAPSVKCAICDFITNTGINAMSPAPCPRPTSNESAYNASSASVPTSQPQNVTVVVENPMTVDEKGKLVSNVVVGITPGKN

SEQ ID NO: 1019 - protein, 181 aa, Physcomitrella patens subsp. patens
  misc_feature: Public GI ID no. 168002291
  misc_feature (1)..(181): Bit score of 285.7 for hmm based on sequences of FIGURE 11.
  misc_feature (13)..(37): Pfam Name: zf-LSD1 Pfam Description: LSD1 zinc finger
  misc_feature: Functional Homolog Of SEQ ID NO. 316
MQGGQPQQGQLICSGCRTLLVYPQGASNVRCALCSSVTQVPSHGTEMAQLVCGGCRTLLMYMRGATSVQCSCCHTVNLAMEAPQVAHINCGGCGMTLMYAYGAQSVKCALCQFVTTITMPSMRVQLPSISQQPRPPQAHGGPPPALTSSHTQTVVVENPMTMDESGKLVSNVAVGVSTDRR

SEQ ID NO: 1020 - protein, 141 aa, Picea sitchensis
  misc_feature: Public GI ID no. 116782827
  misc_feature (1)..(141): Bit score of 67.1 for hmm based on sequences of FIGURE 3.
  misc_feature (38)..(126): Pfam Name: Cystatin Pfam Description: Cystatin domain
  misc_feature: Functional Homolog Of SEQ ID NO. 102
MQSRRQIDSFGVFVLCVIAIGVLGISSSRGAAAMGTLGGLRDVKDFQNSIETLDLGRFAVDEHNKQQNGDISFRRVVAAQEQVVAGTMYHLTIEAEDGDHPKLYKAKVWVKPWENFKRLEDFKPVEQPSVSRADLGVKQGS

SEQ ID NO: 1021 - protein, 141 aa, Picea sitchensis
  misc_feature: Public GI ID no. 116784931
  misc_feature (1)..(141): Bit score of 70.1 for hmm based on sequences of FIGURE 3.
  misc_feature (38)..(126): Pfam Name: Cystatin Pfam Description: Cystatin domain
  misc_feature: Functional Homolog Of SEQ ID NO. 102
MQSRRQIDSFGVFVLCVIAIGVLGISSSRGAAAMGTLGGLRDVKDFQNSIETLDLGRFAVDEHNKQQNGDITFRRVVAAQEQVVAGTMYHLTIEAEDGDHPKLYKAKVWVKPWENFKRLEDFKPVEQPSVSRADLGVKQGS

SEQ ID NO: 1022 - protein, 231 aa, Picea sitchensis
  misc_feature: Public GI ID no. 116784187
  misc_feature (1)..(231): Bit score of 67.1 for hmm based on sequences of FIGURE 3.
  misc_feature (38)..(126): Pfam Name: Cystatin Pfam Description: Cystatin domain
  misc_feature: Functional Homolog Of SEQ ID NO. 102
MQSRRQIDSFGVFVLCVIAIGVLGISSSRGAAAMGTLGGLRDVKDFQNSIETLDLGRFAVDEHNKQQNGDISFRRVVAAQEQVVAGTMYHLTIEAEDGDHPKLYKAKVWVKPWENFKRLEDFKPVEQPSVSRADLGVKQVHAEGLGWRTVPVHDPVVQEAAQHAVKNIQQQSNSLAAYELQEVLSAKAEVVDASSKVDLHLKTKRGSKVEEHKVEMHCNPDGKWILRSRLT

SEQ ID NO: 1023 - protein, 231 aa, Picea sitchensis
  misc_feature: Public GI ID no. 116793617
  misc_feature (1)..(231): Bit score of 70.1 for hmm based on sequences of FIGURE 3.
  misc_feature (38)..(126): Pfam Name: Cystatin Pfam Description: Cystatin domain
  misc_feature: Functional Homolog Of SEQ ID NO. 102
MQSRRQIDSFGVFVLCVIAIGVLGISSSRGAAAMGTLGGLRDVKDFQNSIETLDLGRFAVDEHNKQQNGDITFRRVVAAQEQVVAGTMYHLTIEAEDGDHPKLYKAKVWVKPWENFKRLEDFKPVEQPSVSRADLGVKQVHAEGLGWRTVPVHDPVVQEAAQHAVKNIQQQSNSLAAYELQEVLSAKAEVVDASSKVHLHLKTKRGSKVEEHKVEMHCNPDGKWILRSLLT

SEQ ID NO: 1024 - protein, 130 aa, Picea sitchensis
  misc_feature: Public GI ID no. 116779648
  misc_feature (1)..(130): Bit score of 66.3 for hmm based on sequences of FIGURE 3.
  misc_feature (38)..(126): Pfam Name: Cystatin Pfam Description: Cystatin domain
  misc_feature: Functional Homolog Of SEQ ID NO. 102
MCMKMSMKMPMRCSRTMAVLILLLGCLCMLSDASTRIGGIRDIPDVEHKKEIQDLGRFAVDEYNTQQNVGISFSKVVKAQEQVVSGLLYYLTIKTKEGSKTKLYAAKIWVKPWEKFKQLQEFKPVQTLHK

SEQ ID NO: 1025 - DNA, 460 bp, Brassica napus
  misc_feature: Ceres Clone ID no. 1090776
  misc_feature: Encodes the peptide sequence at SEQ ID NO. 1026
aattccacaaaaaaacaacggttacaaaatacagactgcgaaaatgaataacaaggcaacatccattcttctcctctctctcgttctcctccctctatacgcgtctgcgtcgccgcgtgtcggcggatggcgtcccctcagcgacgttaatgaccctcacgtcgtagagatcggcagattctcggtgtccgagtacaacatgcagagtaaatcgggactcaagttcgtggcggttgttagcggcgagactcaggtagttgctggcatgaattaccggcttattgttgcggttaatgatggcgtaaagatagccggtgctggtgccagcaagaactacgaggctattgtatgggagagggcgtggttgaaatcgatgaatctcacttctttcaagcctgccatttaattaatggctgtttcgtctgagttcttccatatgtaatgatctgataaaaacagt

SEQ ID NO: 1026 - protein, 120 aa, Brassica napus
  misc_feature: Ceres Clone ID no. 1090776
  misc_feature (1)..(120): Bit score of 217.2 for hmm based on sequences of FIGURE 3.
  misc_feature (27)..(120): Pfam Name: Cystatin Pfam Description: Cystatin domain
  misc_feature: Functional Homolog Of SEQ ID NO. 102
MNNKATSILLLSLVLLPLYASASPRVGGWRPLSDVNDPHVVEIGRFSVSEYNMQSKSGLKFVAVVSGETQVVAGMNYRLIVAVNDGVKIAGAGASKNYEAIVWERAWLKSMNLTSFKPAI

SEQ ID NO: 1027 - DNA, 517 bp, Brassica napus
  misc_feature: Ceres Clone ID no. 1264803
  misc_feature: Encodes the peptide sequence at SEQ ID NO. 1028
aaaaaaaaagatgcaaagccgtttcttcttcttcatcattgttatctctctctcatccatcttcgtttcctctctgatcgctacttcctgcaacaacgacatggccatgctcggcggcgttcgcgatgtaccttccaacgagaacagtgtcgaggtcgagagcctcgctcgtttcgctgtcgatgagcacaacaagaaagagaatgcactgctcgagttcgcgagagtggtgaaggcgaaagagcaagttgtggcgggaacgatgcaccacctgactcttgagatcatcgaggctgggaagaagaagctttacgaggctaaagtgtgggtgaagccttggttgaacttcaaggagttgcaggagttcaagccttctactaccatcactccctcagatcttggctgcaagaaaggtgagggtgcatctggatggagggaagttccaggagatgatccggaagtgcagcacgttgctgatcatgctgttaagagtatacagcagaggtctaactccttg

SEQ ID NO: 1028 - protein, 169 aa, Brassica napus
  misc_feature: Ceres Clone ID no. 1264803
  misc_feature (1)..(169): Bit score of 68.9 for hmm based on sequences of FIGURE 3.
  misc_feature (35)..(123): Pfam Name: Cystatin Pfam Description: Cystatin domain
  misc_feature: Functional Homolog Of SEQ ID NO. 102
MQSRFFFFIIVISLSSIFVSSLIATSCNNDMAMLGGVRDVPSNENSVEVESLARFAVDEHNKKENALLEFARVVKAKEQVVAGTMHHLTLEIIEAGKKKLYEAKVWVKPWLNFKELQEFKPSTTITPSDLGCKKGEGASGWREVPGDDPEVQHVADHAVKSIQQRSNSL

SEQ ID NO: 1029 - DNA, 390 bp, Solanum lycopersicum
  misc_feature: Ceres Annot ID no. 8459058
  misc_feature: Encodes the peptide sequence at SEQ ID NO. 1030
atggccataaaattcaaccgcaatctcgccggaactctcttcgccgccgtggtagtcgcttccctcttcttccacgcctccgctgcactcggcggaggaaaaggcggtttactcggcggttggagccgtataaccgacacaaaagacagtaaagtagcggagatcggtaaattcgcagtggatcagtacaacgagaataccaaatccaaattagtgtttaaacgagtggtgaaaggagaaacacaagtcgtcgccgggacaaattaccgactggtcatctccgccacagacggcggtcgtcgtagccgcagcggcgataagtacttggcggaagtttgggataagccatggatgagctggaggaatctcacttccttcaaaaaattgtag

SEQ ID NO: 1030 - protein, 129 aa, Solanum lycopersicum
  misc_feature: Ceres Annot ID no. 8459058
  misc_feature (1)..(129): Bit score of 160.9 for hmm based on sequences of FIGURE 3.
  misc_feature (39)..(117): Pfam Name: Cystatin Pfam Description: Cystatin domain
  misc_feature: Functional Homolog Of SEQ ID NO. 102
MAIKFNRNLAGTLFAAVVVASLFFHASAALGGGKGGLLGGWSRITDTKDSKVAEIGKFAVDQYNENTKSKLVFKRVVKGETQVVAGTNYRLVISATDGGRRSRSGDKYLAEVWDKPWMSWRNLTSFKKL

SEQ ID NO: 1031 - DNA, 372 bp, Sorghum bicolor
  misc_feature: Ceres Annot ID no. 8640378
  misc_feature: Encodes the peptide sequence at SEQ ID NO. 1032
atggctactacgagagctcttctcctgacgacgactgcggcggcgctgctgctcctgctcgccggcggcggaggcgcggcggcggcgcgtgggccgctggcgggcgggtggagcccgatcaggaacgtgagcgagccgcacatccaggagctgggcgggtgggcggtgacggagcacgtcagggtggccaacgacgggctgaggttcggcgaggtgacgagcggggagcagcaggtggtgtccgggatgaactacaggctcgtcctccacgccacggacgccgacggggacgtcgcggcgtacggggccctggtgtacgagcagtcgtggaccaacacccgcgagctcatgtccttcgcgtccgccaactga

SEQ ID NO: 1032 - protein, 123 aa, Sorghum bicolor
  misc_feature: Ceres Annot ID no. 8640378
  misc_feature (1)..(123): Bit score of 165.5 for hmm based on sequences of FIGURE 3.
  misc_feature (35)..(123): Pfam Name: Cystatin Pfam Description: Cystatin domain
  misc_feature: Functional Homolog Of SEQ ID NO. 102
MATTRALLLTTTAAALLLLLAGGGGAAAARGPLAGGWSPIRNVSEPHIQELGGWAVTEHVRVANDGLRFGEVTSGEQQVVSGMNYRLVLHATDADGDVAAYGALVYEQSWTNTRELMSFASAN

SEQ ID NO: 1033 - DNA, 408 bp, Sorghum bicolor
  misc_feature: Ceres Annot ID no. 8640379
  misc_feature: Encodes the peptide sequence at SEQ ID NO. 1034
atggcgacgcccggccaccacctcccgctcctcctcctcgtcctggccacccttgccgcggccgccttcgccgtcgccccagtccccggcccggcggcgctgggcggcggcggcccgctgctgggcgggtggaacccgatcccggacgtgggggacaagcacatccaggagctgggcgggtgggcgctggggcaggccaagtaccagaagctggccgccaacgcgctgcggttccgccgcgtggtgcgcggcgaggagcaggtcgtgtccgggatgaggtaccgcctctacgtcgacgccgccgaccgcgccggccgctccgtcacctacgtcgccgtcatctacgagcaggtctggaccaacacccgcaagctcgcctccttcaccctggcgtcccgcgcccactga

SEQ ID NO: 1034 - protein, 135 aa, Sorghum bicolor
  misc_feature: Ceres Annot ID no. 8640379
  misc_feature (1)..(135): Bit score of 156.1 for hmm based on sequences of FIGURE 3.
  misc_feature (35)..(123): Pfam Name: Cystatin Pfam Description: Cystatin domain
  misc_feature: Functional Homolog Of SEQ ID NO. 102
MATPGHHLPLLLLVLATLAAAAFAVAPVPGPAALGGGGPLLGGWNPIPDVGDKHIQELGGWALGQAKYQKLAANALRFRRVVRGEEQVVSGMRYRLYVDAADRAGRSVTYVAVIYEQVWTNTRKLASFTLASRAH

SEQ ID NO: 1035 - DNA, 402 bp, Sorghum bicolor
  misc_feature: Ceres Annot ID no. 8669169
  misc_feature: Encodes the peptide sequence at SEQ ID NO. 1036
atgcgcaaacatcgaatcgtcccactcgtggctgccctgctcgtgctgcttgccctcgccgtatcgtccacccgcaaccgcaacgcacaagagggggaggagtccatggcgttggccggcggcatcaaggacgtgccggcgaacgagaacgacctccacctgcaggagctcgcccgcttcgccgtcgaggagcacaacaagaaggccaatgctcttctggggtatgagaagcttgtgaaggccaagacacaagtggttgctggcacgatgtactatctcactgttgaggtgaaggatggcgaagtcaagaagctctacgaagctaaggtctgggagaagccatgggagaacttcaaggagctgcaggaattcaagcctgttgaagagggtgctagcgcctaa

SEQ ID NO: 1036 - protein, 133 aa, Sorghum bicolor
  misc_feature: Ceres Annot ID no. 8669169
  misc_feature (1)..(133): Bit score of 104.9 for hmm based on sequences of FIGURE 3.
  misc_feature (40)..(128): Pfam Name: Cystatin Pfam Description: Cystatin domain
  misc_feature: Functional Homolog Of SEQ ID NO. 102
MRKHRIVPLVAALLVLLALAVSSTRNRNAQEGEESMALAGGIKDVPANENDLHLQELARFAVEEHNKKANALLGYEKLVKAKTQVVAGTMYYLTVEVKDGEVKKLYEAKVWEKPWENFKELQEFKPVEEGASA

SEQ ID NO: 1037 - DNA, 483 bp, Sorghum bicolor
  misc_feature: Ceres Annot ID no. 8680268
  misc_feature: Encodes the peptide sequence at SEQ ID NO. 1038
atgcgtcctggccaaaagctactatttaagtggcacctagtcatcttcctaataggtcactactccacggcaaaccaaaaccaattgcttcttcacggacttgcgaccaccaagcctgccatgagggccgccgtcctcctcggagttttgggcatcgccatcgttgccattcacattgttgcgatggcaacacccgccatggctcaaaccttcggtgtgtggtaccctgtagacctcagcgaggggcacgtccagtacatcggcaggtgggcggtcgcggagcacgtgaagcaggccaaggacgggctcaagttcgacaaggtcgtcggcggcgagatgatgatgagtataggcatagacttccgcctcgtcatcgacgcatcatccaccagcgacggcaagcatgccaactacgaggcgagggtgcacgagagggactggatggacggaataagtctcctgtcatttaagccggcaaagtga

SEQ ID NO: 1038 - protein, 160 aa, Sorghum bicolor
  misc_feature: Ceres Annot ID no. 8680268
  misc_feature (1)..(160): Bit score of 94.7 for hmm based on sequences of FIGURE 3.
  misc_feature (72)..(160): Pfam Name: Cystatin Pfam Description: Cystatin domain
  misc_feature: Functional Homolog Of SEQ ID NO. 102
MRPGQKLLFKWHLVIFLIGHYSTANQNQLLLHGLATTKPAMRAAVLLGVLGIAIVAIHIVAMATPAMAQTFGVWYPVDLSEGHVQYIGRWAVAEHVKQAKDGLKFDKVVGGEMMMSIGIDFRLVIDASSTSDGKHANYEARVHERDWMDGISLLSFKPAK

SEQ ID NO: 1039 - DNA, 348 bp, Sorghum bicolor
  misc_feature: Ceres Annot ID no. 8634192
  misc_feature: Encodes the peptide sequence at SEQ ID NO. 1040
atgagaaccagcttcctgctcctcgctgctgccatctgcgccgttgtcgcatccgtggtctccgccgattcccaaggatggttcccgttgccggacattgacgccccgaaagtgcagcagcttggcaggtgggcggtgacggagcacgacaagaaggcgaacgacaaggtcaagttcaaccgggtggtgagcggcgaggagacgttggatccggagctagtaggcatcaagtaccacttggtcattgatgcgtcggatggcagtggccagcataggaagtacgaggccgtgctaggcgaggaatggataggtcgtatcattcttatctcctttaatcctgctagatga

SEQ ID NO: 1040 - protein, 115 aa, Sorghum bicolor
  misc_feature: Ceres Annot ID no. 8634192
  misc_feature (1)..(115): Bit score of 75.3 for hmm based on sequences of FIGURE 3.
  misc_feature (28)..(115): Pfam Name: Cystatin Pfam Description: Cystatin domain
  misc_feature: Functional Homolog Of SEQ ID NO. 102
MRTSFLLLAAAICAVVASVVSADSQGWFPLPDIDAPKVQQLGRWAVTEHDKKANDKVKFNRVVSGEETLDPELVGIKYHLVIDASDGSGQHRKYEAVLGEEWIGRIILISFNPAR

SEQ ID NO: 1041 - DNA, 502 bp, Triticum aestivum
  misc_feature: Ceres Clone ID no. 774977
  misc_feature: Encodes the peptide sequence at SEQ ID NO. 1042
acaactccccaggccccaacaccagtccatcttcatggcgcgggtacccgtcctcctcctcgccctcttcgccgcggccctcgcggccgccccggcggcggcgctgggcggccgcggcgcgcgggtcggcgggtggggccccatcccggacgtgacggacgcgcacatccaagaactcggcggatgggcggtggagcagcacgcgaggctgaccagcgacgggctgcggttccgccgggtcacgcgcggcgagcagcaggtcgtctccggcatgaactaccgcctcttcgtcgacgcggccgacggctccggcaagagcgcgccctacgtcgccgaggtgtacgagcagtattggaccaagacccgccagctcacctccttcaagccggcggccaactgatccgctccccctccggcgcatgccgatccgcggccggcgaccgcgtccgctctggttaatctcatctgcccgtccttcgtagtttgtactaccactagtgct

SEQ ID NO: 1042 - protein, 121 aa, Triticum aestivum
  misc_feature: Ceres Clone ID no. 774977
  misc_feature (1)..(121): Bit score of 206.8 for hmm based on sequences of FIGURE 3.
  misc_feature (32)..(120): Pfam Name: Cystatin Pfam Description: Cystatin domain
  misc_feature: Functional Homolog Of SEQ ID NO. 102
MARVPVLLLALFAAALAAAPAAALGGRGARVGGWGPIPDVTDAHIQELGGWAVEQHARLTSDGLRFRRVTRGEQQVVSGMNYRLFVDAADGSGKSAPYVAEVYEQYWTKTRQLTSFKPAAN

SEQ ID NO: 1043 - DNA, 557 bp, Triticum aestivum
  misc_feature: Ceres Clone ID no. 778279
  misc_feature: Encodes the peptide sequence at SEQ ID NO. 1044
aacaccgaaaagtgaaaaccaaaagcaagagaactcggccatggcgagaccgctcttcctgctcgccctcctggccacggctctcgcagccacctcaaccctcggccgccgcggcgggctcctgggcgggtggagccccgtcccggacgtgaacgacgcgcacgtccaggagctcggcgggtgggcggtggcccagcaccccagcctagccaacgacgggctgctcttccgccgggtgacgcgcggcgagcagcaggtggtgtccgggatgaactaccgcctcttggtggtcgcggcggacggctccggcaagagcgtgatctatctcgcgcagatctacgagcactggagcggcacccgcaaactcacgtccttcaagccggctgccggcggctaactgatgcgccttgaatttcatctgttcgtcctttgtgcatgtacgtagtactccactacaagtaaataaatgagtcgtgtggtttgatcgtcaggcatgcagttcatcctgactaataatatttgctatcactagcaaataaaaatgtgattactcttcc

SEQ ID NO: 1044 - protein, 118 aa, Triticum aestivum
  misc_feature: Ceres Clone ID no. 778279
  misc_feature (1)..(118): Bit score of 172.1 for hmm based on sequences of FIGURE 3.
  misc_feature (29)..(116): Pfam Name: Cystatin Pfam Description: Cystatin domain
  misc_feature: Functional Homolog Of SEQ ID NO. 102
MARPLFLLALLATALAATSTLGRRGGLLGGWSPVPDVNDAHVQELGGWAVAQHPSLANDGLLFRRVTRGEQQVVSGMNYRLLVVAADGSGKSVIYLAQIYEHWSGTRKLTSFKPAAGG

SEQ ID NO: 1045 - DNA, 491 bp, Zea mays
  misc_feature: Ceres Clone ID no. 337918
  misc_feature: Encodes the peptide sequence at SEQ ID NO. 1046
aaacatcgaatcgtctcactcgtgtctgccctgctcatactgcttgccctcgccgtatcgtccacccgcaacgcacaggaggattccatggccaacaacaccgggacgttggtgggcggcatccaggacgtgccggggagcgagaacgaccttcacctccaggagctcgcccgcttcgccgtcgatgagcacaacaagaaggccaatgctcttctggggttcgagaagcttgtgaaggccaagacacaagtggttgctggcacgatgtactatctcactattgaagtgaaggatggcgaagtcaagaagctctacgaagctaaggtatgggagaagccatgggagaagttcaaggagctgcaggaattcaaacctgttgaagagggtgctaccgctaaggatgtctccttctccatgtgcgagcctgaagctcaaagcaggttcaccatttaaaggtcttggtaactgaagtcccgaaatccttctcccat

SEQ ID NO: 1046 - protein, 121 aa, Zea mays
  misc_feature: Ceres Clone ID no. 337918
  misc_feature (1)..(121): Bit score of 73.1 for hmm based on sequences of FIGURE 3.
  misc_feature (10)..(98): Pfam Name: Cystatin Pfam Description: Cystatin domain
  misc_feature: Functional Homolog Of SEQ ID NO. 102
MANNTGTLVGGIQDVPGSENDLHLQELARFAVDEHNKKANALLGFEKLVKAKTQVVAGTMYYLTIEVKDGEVKKLYEAKVWEKPWEKFKELQEFKPVEEGATAKDVSFSMCEPEAQSRFTI

SEQ ID NO: 1047 - DNA, 772 bp, Zea mays
  misc_feature: Ceres Clone ID no. 1598477
  misc_feature: Encodes the peptide sequence at SEQ ID NO. 1048
gcgcaaacatcgaatcgtctcactcgtgtctgccctgctcatactgcttgccctcgccgtatcgtccacccgcaacgcacaggaggattccatggccaacaacaccgggacgttggtgggcggcatccaggacgtgccggggagcgagaacgaccttcacctccaggagctcgcccgcttcgccgtcgatgagcacaacaagaaggccaatgctcttctggggttcgagaagcttgtgaaggccaagacacaagtggttgctggcacgatgtactatctcactattgaagtgaaggatggcgaagtcaagaagctctacgaagctaaggtctgggagaagccatgggagaacctcaaggggctgcaggaattcaagcctgttgaagagggtgctagcgcctaaggatgtctccttctccatgtgcgagcctgaagctcaaagcaaagttgcagaataaggagccatgctcccttgtgtaatttcataagactacaaccctattagggcttgtttggttgtgtctgtatcgaagggaattgaaggtgattaattttccttctattctaatagaggggttttaatctcctccaatactcttcaatccacacctaaccgaacaagcccttaatatgatatcttacattgccgtatctgtgtaatatcatgaataaaatttgctattatgtattctaaggttaaaaaaaaaagcccactccagcgctgaaggcctgcagcgccagcgcagcgcctctctgctactgtgctggctga

SEQ ID NO: 1048 - protein, 103 aa, Zea mays
  misc_feature: Ceres Clone ID no. 1598477
  misc_feature (1)..(103): Bit score of 67.7 for hmm based on sequences of FIGURE 3.
  misc_feature (10)..(98): Pfam Name: Cystatin Pfam Description: Cystatin domain
  misc_feature: Functional Homolog Of SEQ ID NO. 102
MANNTGTLVGGIQDVPGSENDLHLQELARFAVDEHNKKANALLGFEKLVKAKTQVVAGTMYYLTIEVKDGEVKKLYEAKVWEKPWENLKGLQEFKPVEEGASA

SEQ ID NO: 1049 - protein, 118 aa, Vitis vinifera
  misc_feature: Public GI ID no. 147854421
  misc_feature (1)..(118): Bit score of 228.1 for hmm based on sequences of FIGURE 3.
  misc_feature (32)..(118): Pfam Name: Cystatin Pfam Description: Cystatin domain
  misc_feature: Functional Homolog Of SEQ ID NO. 102
  misc_feature (44)..(44): Xaa is any aa, unknown, or other
  misc_feature (61)..(61): Xaa is any aa, unknown, or other
MAWGQNRLFLFLTAALLLLNGGFAARTEALAGGWRPIKNISDPXVQEIGEFAVTEHNKQAXESLKFQSVVSGETQVVSGTNYRLVVVAEDGGVSNKYEAVVWEKPWMGFRNLTSFTRV

SEQ ID NO: 1050 - DNA, 783 bp, Panicum virgatum
  misc_feature: Ceres Clone ID no. 1890423
  misc_feature: Encodes the peptide sequence at SEQ ID NO. 1051
aacacaaacaggaacagctacccagcaactagctagcatccatgcagccaatggcatccctcacagcgaacgcactgtgcgtcgtccccaccatggcgacggcagctgcaccgcgccgccaccgcagcctcgtcgtggccagagcttctgctgccaaggttgatgacgccgccggtgggcggcgccgagccatggtgttgctcgccgccgcggcggccaccactgcctcgacagcagccgccggccggtccgcgagagccgctgtgtccacgaaaaccgggcagtgggcggaaatagagaacgtgacggacccttacgtgcaggatctcggcaaatgggctgtcacggagcacaacaagcagtctggggagggtttggagtttggtaaggtcgtcagaggcaggcagcaagtcgtcgcgggcatgaactacagtctcgagatcgaaacgaagggaccctcccgtttctacgaagcgggtctgtttgtttccctgccgccggagaagcgtcagctcaagtccttcacgcccttgcttgggtgatgggaacaggttgctgcaagctgaggacggccattgcatgctctgagtctctctgatgtgtgtgtttgggccttgctactgttccccaatgtctgagagtcgtatgtggtgttctactaataatttggttttgcagaataaagggaacaaattaaaggtggcttgtgtttttcttttctcaattaactgtctatgttttcatgcatgcatgcaaggacatggccccgagaaaggtttcacg

SEQ ID NO: 1051 - protein, 166 aa, Panicum virgatum
  misc_feature: Ceres Clone ID no. 1890423
  misc_feature (1)..(166): Bit score of 103.6 for hmm based on sequences of FIGURE 3.
  misc_feature (80)..(166): Pfam Name: Cystatin Pfam Description: Cystatin domain
  misc_feature: Functional Homolog Of SEQ ID NO. 102
MQPMASLTANALCVVPTMATAAAPRRHRSLVVARASAAKVDDAAGGRRRAMVLLAAAAATTASTAAAGRSARAAVSTKTGQWAEIENVTDPYVQDLGKWAVTEHNKQSGEGLEFGKVVRGRQQVVAGMNYSLEIETKGPSRFYEAGLFVSLPPEKRQLKSFTPLLG

SEQ ID NO: 1052 - DNA, 642 bp, Panicum virgatum
  misc_feature: Ceres Clone ID no. 2025090
  misc_feature: Encodes the peptide sequence at SEQ ID NO. 1053
agatgcgcaaacacctaatcgccggaccggtcgctgccctgctcgccctcgccctcaccctcaccctcaccctcaccctctcgctcacccgcagcgcgcaagaggagccgctcatggccgaccgcgagccgctggctggcggcgtcacggacgcgccgcagaacgacaacgacatccacctccaggagctcgcccgcttcgccgtcgacgagcacaacaagaagaccaatgctctcctggagttcgagaagcttgtgaaggcgaagacgcaagtggttgctggaaccatgtactatctcactgttgaggtgaaggatggggaaaccaagaagctctatgaagctaaggtctgggagaagccatgggagaacttcaaggagctgcaggaattcaagcctgtggaagagagtgctagcgcttaaggatccctcgtcttccacgtgcaattgctgcctgaagcgctaaacagacttgcagaataaggagctggatcggatgtaatagttgtgtcgttgtgagctccgttgtgtaatatcgtatgaacaccttgccctttgtgtaatatcatgaatgacagtgccctttgtgtataactaaataactgcgctgagttttcatcagtacagtcgcgacggaattctc

SEQ ID NO: 1053 - protein, 139 aa, Panicum virgatum
  misc_feature: Ceres Clone ID no. 2025090
  misc_feature (1)..(139): Bit score of 77.5 for hmm based on sequences of FIGURE 3.
  misc_feature (46)..(134): Pfam Name: Cystatin Pfam Description: Cystatin domain
  misc_feature: Functional Homolog Of SEQ ID NO. 102
MRKHLIAGPVAALLALALTLTLTLTLSLTRSAQEEPLMADREPLAGGVTDAPQNDNDIHLQELARFAVDEHNKKTNALLEFEKLVKAKTQVVAGTMYYLTVEVKDGETKKLYEAKVWEKPWENFKELQEFKPVEESASA

SEQ ID NO: 1054 - DNA, 655 bp, Panicum virgatum
  misc_feature: Ceres Clone ID no. 1959764
  misc_feature: Encodes the peptide sequence at SEQ ID NO. 1055
agatgcgcaaacaccggatcgccggactcgtggctgccctgctcgccctcgccctcgccctctccctctccctctcgtccctccgcaccgcgcaagaggagccgcccatggcggacagcgggcctctggcgggcggcgtcacggacgtgccgcagaacgaaaacgacatccacctacaggagctcgcccgcttcgccgtcgacgagcacaacaagaaggccaatgctctcctggggttcgagaagcttgtgaaggcgaagacgcaagtggttgctggaaccatgtactatctcactgttgaggtgaaggatggggaagccaagaagctctatgaagctaaggtctgggagaagccatgggagaacttcaaggagctgcaggaattcaagcctgttgaagagagtgctagcgcttaaggatatctcgtcttccacgtgcaattgctacctgaagcactaaacagacttgcagaataaggagctggttcggatgtataatagatgtgctgttgcgagctccgttgtgtagtatcataagatcaccttgccctttgtgtaatatcatgaataacggtgtcctttgtgtaaaatcatgaattcagtgccctttatgtgtaacattataaataaataacaggggctgagtattcatcagt

SEQ ID NO: 1055 - protein, 137 aa, Panicum virgatum
  misc_feature: Ceres Clone ID no. 1959764
  misc_feature (1)..(137): Bit score of 86.6 for hmm based on sequences of FIGURE 3.
  misc_feature (44)..(132): Pfam Name: Cystatin Pfam Description: Cystatin domain
  misc_feature: Functional Homolog Of SEQ ID NO. 102
MRKHRIAGLVAALLALALALSLSLSSLRTAQEEPPMADSGPLAGGVTDVPQNENDIHLQELARFAVDEHNKKANALLGFEKLVKAKTQVVAGTMYYLTVEVKDGEAKKLYEAKVWEKPWENFKELQEFKPVEESASA

SEQ ID NO: 1056 - DNA, 627 bp, Panicum virgatum
  misc_feature: Ceres Clone ID no. 1721159
  misc_feature: Encodes the peptide sequence at SEQ ID NO. 1057
agatgcgcaaacaccgaatcgccggaccggtcgctgccctgctcgccctcaccctcaccctctcgctcccccgcagcgcgcaagaggagccgcccatggccgaccgcgggccgctggctggcggcgtcacggacgcgccgcagaacgacaacgacatccacctccaggagctcgcccgcttcgccgtcgacgagcacaacaagaagaccaatgctctcctggagttcgagaagcttgtgaaggcgaagacgcaagtggttgctggaaccatgtactatctcactgttgaggtgaaggatggggaagccaagaagctctatgaagctaaggtctgggagaagccatgggagaacttcaaggagctgcaggaattcaagcctgtggaagagagtgctagcgcttaaggatccctcgtcttccacgtgcaattgctgcctgcagcgctaaacagacttgcagaataaggagctggatcggatgtaatagctgtgtcgttgtgagctccgttgtgtaatatcgtatgaacaccttgccctttgtgtaatatcatgaatgacagtgccctttgtgtataactaaataactgcgctgagttttcattagtacgagtcgcgacggaattctcat

SEQ ID NO: 1057 - protein, 133 aa, Panicum virgatum
  misc_feature: Ceres Clone ID no. 1721159
  misc_feature (1)..(133): Bit score of 76.5 for hmm based on sequences of FIGURE 3.
  misc_feature (40)..(128): Pfam Name: Cystatin Pfam Description: Cystatin domain
  misc_feature: Functional Homolog Of SEQ ID NO. 102
MRKHRIAGPVAALLALTLTLSLPRSAQEEPPMADRGPLAGGVTDAPQNDNDIHLQELARFAVDEHNKKTNALLEFEKLVKAKTQVVAGTMYYLTVEVKDGEAKKLYEAKVWEKPWENFKELQEFKPVEESASA

SEQ ID NO: 1058 - DNA, 632 bp, Panicum virgatum
  misc_feature: Ceres Clone ID no. 1865100
  misc_feature: Encodes the peptide sequence at SEQ ID NO. 1059
agatgcgcaaacaccgaatcgccggaccggtcgctgccctgctcgccctcaccctcaccctcaccctctcgctcacccgcagcgcgcaagaggagccgcccatggccgaccgcgggccgctggctggcggcgtcacggacgcgccgcacaacgacaacgacatccacctccaggagctcgcccgcttcgccgtcgacgagcacaacaagaagaccaatgctctcctggagttcgagaagcttgtgaaggcgaagacgcaagtggttgctggaaccatgtactatctcactgttgaggtgaaggatggggaagccaagaagctctatgaagctaaggtctgggagaagccatgggagaacttcaaggagctgcacgaattcaagcctgtggaagagagtgctagcgcttaaggatccctcgtcttccacatgcaattgctgcctgaaccgctaaacagacttgcagaataaggagctggattggatgtaatagctgtgtcattgtgagctccgttgtgtaatatcgtatgaacaccttgccctttgtgtaatatcatgaatgacagtgccctttgtgtataactaaataactgcgctgagttttcatcaaaaaaagttttcacccccaaccct

SEQ ID NO: 1059 - protein, 135 aa, Panicum virgatum
  misc_feature: Ceres Clone ID no. 1865100
  misc_feature (1)..(135): Bit score of 77.5 for hmm based on sequences of FIGURE 3.
  misc_feature (42)..(130): Pfam Name: Cystatin Pfam Description: Cystatin domain
  misc_feature: Functional Homolog Of SEQ ID NO. 102
MRKHRIAGPVAALLALTLTLTLSLTRSAQEEPPMADRGPLAGGVTDAPHNDNDIHLQELARFAVDEHNKKTNALLEFEKLVKAKTQVVAGTMYYLTVEVKDGEAKKLYEAKVWEKPWENFKELHEFKPVEESASA

SEQ ID NO: 1060 - DNA, 688 bp, Panicum virgatum
  misc_feature: Ceres Clone ID no. 2050930
  misc_feature: Encodes the peptide sequence at SEQ ID NO. 1061
agatgcgcaaacaccgaatcgccggaccggtcgctgccctgctcgccctcaccctcaccctcaccctctcgctcacccgcagcgcgcaagaggagccgcccatggccgaccgcgggccgctggctggcggcgtcacggacgcgccgcagaacgacaacgacatccacctccaggagctcgcccgcttcgccgtcgacgaccacaacaagaagaccaatgctctcctggagttcgagaagcttgtgaaggcgaagacgcaagtggttgctggaaccatgtactatctcactgttgaggtgaaggatggggaagccaagaagctctatgaagctaaggtctgggagaagccatgggagaacttcaaggagctgcaggaattcaagcctgtggaagagagtgctagcgcttaaggatccctcgtcttccacgtgcaattgctgcctgaagcgctaaacagacttgcagaataaggagctggatcggatgtaatagctgtgtcgttgtgagctccgttgtgtaatatcgtatgaacaccttgccctttgtgtaatatcatgaatgacagtgccctttgtgtataactaaataactgcgctgagttttcatcagtacgagtcgtgacggaattctcatatcgcagtcttcaactaggagcacgttgattgttcaagtcttctgttagcttgtt

SEQ ID NO: 1061 - protein, 135 aa, Panicum virgatum
  misc_feature: Ceres Clone ID no. 2050930
  misc_feature (1)..(135): Bit score of 72.2 for hmm based on sequences of FIGURE 3.
  misc_feature (42)..(130): Pfam Name: Cystatin Pfam Description: Cystatin domain
  misc_feature: Functional Homolog Of SEQ ID NO. 102
MRKHRIAGPVAALLALTLTLTLSLTRSAQEEPPMADRGPLAGGVTDAPQNDNDIHLQELARFAVDDHNKKTNALLEFEKLVKAKTQVVAGTMYYLTVEVKDGEAKKLYEAKVWEKPWENFKELQEFKPVEESASA

SEQ ID NO: 1062 - DNA, 664 bp, Panicum virgatum
  misc_feature: Ceres Clone ID no. 1882676
  misc_feature: Encodes the peptide sequence at SEQ ID NO. 1063
agatgcgcaaacaccggatcgccggactcgtggctgccctgctcgccctcgccctctccctctccctctcgtccctccgcaccgcgcaagaggagccgcccatggcggacagcgggcctctggcgggcggcgtcacggacgtgccgcagaacgaaaacgacatccacctacaggggctcgcccgcttcgccgtcgacgagcacaacaagaaggccaatgctctcctggggttcgagaagcttgtgaaggcgaagacgcaagtggttgctggaaccatgtactatctcactgttgaggtgaaggatggggaagccaagaagctctatgaagctaaggtctgggagaagccatgggagaacttcaaggagctgcaggaattcaagcctgttgaagagagtgctagcgcttaaggatatctcgtcttccacgtgcaattgctacctgaagcactaaacagacttgcagaataaggagctggttcggatgtataatagatgtgctgttacgagctccgttgtgtagtatcataagatcaccttgccctttgtgtaatatcatgaataacggtgtcctttgtgtaaaatcatgaattcagtgccctttatgtgtaacattataaataaataacagggctgagtattcatcagtacgactcgtgacggat

SEQ ID NO: 1063 - protein, 135 aa, Panicum virgatum
  misc_feature: Ceres Clone ID no. 1882676
  misc_feature (1)..(135): Bit score of 81.4 for hmm based on sequences of FIGURE 3.
  misc_feature (42)..(130): Pfam Name: Cystatin Pfam Description: Cystatin domain
  misc_feature: Functional Homolog Of SEQ ID NO. 102
MRKHRIAGLVAALLALALSLSLSSLRTAQEEPPMADSGPLAGGVTDVPQNENDIHLQGLARFAVDEHNKKANALLGFEKLVKAKTQVVAGTMYYLTVEVKDGEAKKLYEAKVWEKPWENFKELQEFKPVEESASA

SEQ ID NO: 1064 - protein, 140 aa, Oryza sativa subsp. indica
  misc_feature: Public GI ID no. 146403773
  misc_feature (1)..(140): Bit score of 75.5 for hmm based on sequences of FIGURE 3.
  misc_feature (48)..(135): Pfam Name: Cystatin Pfam Description: Cystatin domain
  misc_feature: Functional Homolog Of SEQ ID NO. 102
MRKYRVAGLVAALLVLHSLATPSAQAEAHRAGGEGEEKMSSDGGPVLGGLEPVGNENDLHLVDLARFAVTEHNKKANSLFEFEKRVSVKQQVVAGTLYYFTIEVKEGEAKKLYEAKVWEKPWMDFKELQEFKPVDASANA

SEQ ID NO: 1065 - protein, 481 aa, Zea mays
  misc_feature: Public GI ID no. 194697654
  misc_feature (1)..(481): Bit score of 1227.3 for hmm based on sequences of FIGURE 7.
  misc_feature (40)..(476): Pfam Name: p450 Pfam Description: Cytochrome P450
  misc_feature: Functional Homolog Of SEQ ID NO. 441
MMMMMAGEHVLAALATLLLASLLTLVLNHFLPLPLNPKAPRGSFGWPLLGETLRFLTPHASNTLGGFLEDHCSRYGRVFKSHLFCTPTVVSCDQDLNHFILQNEERLFQCSYPRPIHGILGKSSMLVVLGEDHKRLRNLALALVTSTKLKPSYLGDIEKIALHVVGAWRRHGGVRVVAFCEEARKFAFSVIVKQVLGLSPEEPVTARILEDFLAFMKGLISFPLYIPGTPYAKAVRARERISSTVKGIIKERRSAGSWNKQGDFLDVLLSSNELSDEEKVSFVLDSLLGGYETTSLLISMVVYFLGQSAQDLDLVKREHDSIRSNKGKEECLTSEDYKKMEYTQQVINEALRCGNIVKFVHRKALKDVKYKEYLIPSGWKVLPVFTAVHLNPSLHGDAQQFQPCRWEGTSQGTSKRFTPFGGGPRLCPGSELAKVETAFFLHHLVLNYRWRIDGDDIPMAYPYVEFQRGLPIEIEPTSPES

SEQ ID NO: 1066 - protein, 472 aa, Vitis vinifera
  misc_feature: Public GI ID no. 157350959
  misc_feature (1)..(472): Bit score of 1107.3 for hmm based on sequences of FIGURE 7.
  misc_feature (36)..(467): Pfam Name: p450 Pfam Description: Cytochrome P450
  misc_feature: Functional Homolog Of SEQ ID NO. 441
MAVGFWFVLLVGLVGLVLGLILNHFLPLFFKLGHVPKGTFGWPLLGETLCFLKPHPSNSLGAFLQDRCSRFGKVFKSHLFFSPTVVSCDQELNYFILQNEDKLFQCSYPKPIHGILGKISMLVAVGDTHKRLRNVALSLVTTTKTKPEFLNEVERAAIRVLDSWKDKPQIIFCEEARKFTFNVIVKQVLGLTPDDPQTAKILQDFLTFMRGLISLPLYIPGTPYARAVQARIRISSTVKAIIEERRRDAENSSKRDDFLEILLCVDTLSEDEKVSFVLDSLLGGYETTSLLMALAVHFLGKSPTALEQLKLEHQKIRSMKQKDDYLNWDDYKRMDFTQNVIHEALRCGNVVKFVHRKALKDVKFRDYLIPSGWKVLPVFSAVHLDPSLHASALQFHPWRWEGRDQTCKKFTPFGGGSRCCPGSELAKIQVAFFLHHLVQNFRWNTKDGDQPFAYPYVEFQRGLALNLDHCST

SEQ ID NO: 1067 - protein, 488 aa, Vitis vinifera
  misc_feature: Public GI ID no. 157348151
  misc_feature (1)..(488): Bit score of 1078.7 for hmm based on sequences of FIGURE 7.
  misc_feature (34)..(482): Pfam Name: p450 Pfam Description: Cytochrome P450
  misc_feature: Functional Homolog Of SEQ ID NO. 441
MSDLEFFLLLLASISVPLVILNLIKRKQSGLNLPPGNTGWPFLGETIGYLKPYSATSIGDFMEQHISRFGEIYKSNLFGEPTIVSADSGLNRFILQNEGKLFECSYPRSIGGILGKWSMLVLVGDMHRDMRTISLNFLSHGRLRTHLLPEVVKHTLLVLSSWKENCTFSAQDEAKKFTFNLMAKHIMSLDPGKPETEQLKKEYVTFMKGVVSAPLNFPGTAYRKALQSRSTILKFIELKMEERIQKLRGGGFENMEDDDLLGWVLKHSNLSTEQILDLVLSLLFAGHETSSVAIALAIYFLEGCPNAVQQLREEHLEISRAKKQSGELELSWEDYKKMEFTQCVISETLRLGNVVRFLHRKALKDVRYKGYDIPCGWKVLPVIAAVHLDPSLFDQPQHFNPWRWQQNNGNRGNSTSWSTATNQNFMPFGGGPRLCAGSELAKLEMAVFIHHLVLNYNWELVDKDQAFAFPFVDFPKGLPIKVRHHNFT

SEQ ID NO: 1068 - protein, 485 aa, Pisum sativum
  misc_feature: Public GI ID no. 144905175
  misc_feature (1)..(485): Bit score of 1049.1 for hmm based on sequences of FIGURE 7.
  misc_feature (36)..(480): Pfam Name: p450 Pfam Description: Cytochrome P450
  misc_feature: Functional Homolog Of SEQ ID NO. 441
MSDSDITFYCLSSILSLLLIFILIKTKQTKPKLNLPPGKMGWPFLGETIGYLKPYSATTIGEFMEQHIARYGKIYKSKLFGEPAIVSADAGLNRFILQNEGKLFECSYPRSIGGILGKWSMLVLVGDMHRDMRVISLNFLSHARLRTHLLKEVEKHTLLVLSSWKEKSTFAAQDEAKKFTFNLMAEHIMSLQPGEIETEKLKKEYVTFMKGVVSAPLNFPGTAYWKALKSRCKILKFIEEKMEERIKRMKDGNENLEEDDLLNWVLKHSNLSTEQILDLILSLLFAGHETSSVSIALAIYFLPGCPRAIQQLREEHREIARVKKQAGETELTWEDYKKMEFTHCVVNETLRLGNVVRFLHRKALKDVRYKGYDIPCGWKVLPVIAAVHLDPLLFDQPQHFNPWRWQNNGNCSNASSNNNNNFLPFGGGPRLCAGSELAKLEMAVFIHYLILNYHWELIDNNDQAFAYPFVDFPKGLRIQVQPHQL

SEQ ID NO: 1069 - protein, 476 aa, Pisum sativum
  misc_feature: Public GI ID no. 144905184
  misc_feature (1)..(476): Bit score of 756.1 for hmm based on sequences of FIGURE 7.
  misc_feature (38)..(473): Pfam Name: p450 Pfam Description: Cytochrome P450
  misc_feature: Functional Homolog Of SEQ ID NO. 441
MDTTWILFATPIFLCTLILYYRNRLSLKLKSKHGNQLPLGSLGWPFIGETIDFVSCAYTDRPESFMTKRRTMYGKVFKSHIFGSPTIVSTDADVNKFILQSDAKVFVPSYPKSLMKLMGESSILLINGTLQRRIHGLIGAFFKSQQLKIQITTDMEKYVQESMANWKEDQPIYIQDETKKIAFHVLVKALISLDPGEEMEFLIKHFKEFISGLMSLPISLPGTKLYQSLQAKKKMAKLVRKTIEARRNKGVTEVPKDVVDVLLNDTSEKLTDDLIADNIIDMMIPGEDSVPILMTLATKYLSECPDALQQLTEENIKIKKLKDQLEEPLCWSDYLSLPFTQKIITETLRMGNIINGVMRKALKDVEIKGYIIPQGWCVFANFRSVHLDEKNYDCPYQFNPWRWQEKDMNLNSNNFSPFGGGQRLCPGIDLARLEASIYLHHLVTQFRWYAEEDTIVNFPTVRMKRRMPVLVKRVEI

SEQ ID NO: 1070 - protein, 470 aa, Vitis vinifera
  misc_feature: Public GI ID no. 157335513
  misc_feature (1)..(470): Bit score of 365.8 for hmm based on sequences of FIGURE 7.
  misc_feature (36)..(464): Pfam Name: p450 Pfam Description: Cytochrome P450
  misc_feature: Functional Homolog Of SEQ ID NO. 441
MEKPGFLAYVVIFLLALLFYILRREKREPKHRAKLPPGSMGWPYIGETLQLYSQDPSVFFAAKQKRYGEIFKTHILGCPCVMLASPEAARFVLVTQAHLFKPTYPKSKERLIGPSALFFHQGDYHNRLRKLVQGSLSPEAIRNLVADIEALAVSALDSWAGGHVFNTFHEIKKFSFEVGILAIFGRLEAHYREELKKNYCIVDRGYNSFPTNIPGTPYKKALWARKRLSKILSELIGQRKEKRLADKDLLGSLLNSKDEKGETLTNDQIADNIIGVLFAAQDTTASVMTWILKYLHDDPKLLEAVKAEQKAINKSNEEGNRPLTWSQTRNMPVTHKVILESLRMASIISFTFREAVADVEFKGYLIPKGWKVMPLFRNIHHDPKFFPDPQKFDPSRFEVAPKPNTFVPFGNGVHACPGNELAKLEMLIMTHHLVTKFRWEVAGFQSGIQYGPFPVPVNGLPARLWKQSTT

SEQ ID NO: 1071 - DNA, 1479 bp, Sorghum bicolor
  misc_feature: Ceres Annot ID no. 8713588
  misc_feature: Encodes the peptide sequence at SEQ ID NO. 1072
atggctttcctcctcgctgtagcttgcatctacatcgtgttctcactactcactctgttggtgctgctcgtcgtgagcagacgcagaacgacggcggtcactgccggaaaaaccggaggtgccaccacggagcaggatcacaacaagctgcctcctggctccctgggcctgccgatcatcggcgagactctccagctctacacccagaatccaaaggacttctttgcctccaggctgaagaggtacggcgaggtgttcaagacgcacgtcctgggttgcccgtgcgtgatcctggcaagcccggaggcggcgcggatggtgctggtgtcgcaggcgcacctgttcaagccgacgtacccgccgagcaaggagcgcatgatcggggcgcaggccctcttcttccaccagggcgactaccaccgccgcctgcgccgcctcgtccagagctgggtcggccccgacgcgctccgcgccctcgtgcccgacgtcgaggccgccgtggcgtccacgctccgccggtgggaaggcaacgtcaccagcaccttccacaccatgaagacgctcaccttcgacgtcggcgtcgtcaccatcttcggccgccggctggccgaccacgtgaaggaggagctcaggaagcactacttgatcgtggagaaaggctacaacagcttccccatccccgtccccttcactagctactgccaggccatcaaggcgaggcggcggctgggcgagatactgagcggcatcctggcggagcggcggcgtgcgcggagcggcgacctgggcggcggcggcgacgacgacgacctcctgaacaccctcatgcgctaccgcgacgacaccggggcggcgctctcggacgaccaggtcgccgacaacgtcatcggcgtgctgttcgcggcgcaggacacgacggcgagcgtgctcacctggatcctcaagttcctccacgacaacccgaagcttctggaagccgtcaaggcggaacagatggcaatctacgaggagaacgatggcgggaagctgccgctgacgtgggcgcagacgaggaggatgccgataacacacctggttatcttggagagtctgaggatggcgagcatcatctccttcacgttcagagaggctgttgaggacgtgcactatcaagggttcctgattcccaaagggtggaaggtgatgcctctgttcaggaacatgcactacagcccggactacttccaggatccacacaagttcgacccttcccggttcaaggtgacgccgcgccccggcacgttcctgccgttcgggagcggcgtgcacgcgtgccccggcaacgacctggccaagctcgagatgctcgtcctcatccaccgcctcgtcaccacctacaggtgggaggtggaggggtcgagcgacgacgtgacctacagcccgttcccggtgccgaagcgcggcctccaggcgaggctcaccagggccgccaccgcctga

SEQ ID NO: 1072 - protein, 492 aa, Sorghum bicolor
  misc_feature: Ceres Annot ID no. 8713588
  misc_feature (1)..(492): Bit score of 315.2 for hmm based on sequences of FIGURE 7.
  misc_feature (51)..(486): Pfam Name: p450 Pfam Description: Cytochrome P450
  misc_feature: Functional Homolog Of SEQ ID NO. 441
MAFLLAVACIYIVFSLLTLLVLLVVSRRRTTAVTAGKTGGATTEQDHNKLPPGSLGLPIIGETLQLYTQNPKDFFASRLKRYGEVFKTHVLGCPCVILASPEAARMVLVSQAHLFKPTYPPSKERMIGAQALFFHQGDYHRRLRRLVQSWVGPDALRALVPDVEAAVASTLRRWEGNVTSTFHTMKTLTFDVGVVTIFGRRLADHVKEELRKHYLIVEKGYNSFPIPVPFTSYCQAIKARRRLGEILSGILAERRRARSGDLGGGGDDDDLLNTLMRYRDDTGAALSDDQVADNVIGVLFAAQDTTASVLTWILKFLHDNPKLLEAVKAEQMAIYEENDGGKLPLTWAQTRRMPITHLVILESLRMASIISFTFREAVEDVHYQGFLIPKGWKVMPLFRNMHYSPDYFQDPHKFDPSRFKVTPRPGTFLPFGSGVHACPGNDLAKLEMLVLIHRLVTTYRWEVEGSSDDVTYSPFPVPKRGLQARLTRAATA

SEQ ID NO: 1073 - DNA, 1452 bp, Sorghum bicolor
  misc_feature: Ceres Annot ID no. 8722834
  misc_feature: Encodes the peptide sequence at SEQ ID NO. 1074
atggattcctctcttatcctagcgctgatactcgccgtcgctttggccctgctcctccatctcctaacgagtgcaaataataagccacggcgggccaagcaggtgcccccgggctccctgggcctgccggtgatcggccagagcctgagccttctccgcgccatgcgcgccaactccggcgagcggtggatccaggaccggatccaccggtacggcccggtgtccaagctatcgctgttcggtgcgccgacggtgctccttgcggggcccgccgccaacaagttcaccttcttcagcagggccctagcgatgcagcagccccggtcggtgcagaggatcctcggggagaagagcatcctggagctcgtcggcgccgaccacaagcggatccgcggcgcgctggccgagttcctcaagccggacatgctgaggctgtacgtgggcaagatcgacggcgaggtgcggcgccacctcgacgagcgctgggccggccgcaccaccgtcacggtgatgccgctcatgaagcggctcacgttcgacatcatctccctgctgctcttcggcctccagcggggcgccccgctccaggacgcgctcgccgccgacttcgcgcgcgtcatggatggcatctgggccgtcccggtgaacctgcccttcacggccttcagccggagcctcagggccagcgccagggctcgccggctcatcgccgggatcctgcgggagaccagggccaagctggaaaccggcgaggcctcccggagcagcgacctcatcgcgtgcctgctcagcctgaccgaccaccacagcggcgcgccgctgctgagcgacaaggagatcgtcgacaactccgtcgtcgccctcgtcgccggccacgacacgtcgtccatcctcatgacgttcatggtccgccagctcgccaacgacccggacaccctcgccgccatggtccaagagcacgacgacatcgcaaagagcaagggcgacggcgaggccctggactgggaggacctggcgaagatgaagtacacgtggcgcgtcgcgctggagacgcttcgcctggtgcctcccatgttcggcgacttccggcgagcgttacaggacgtcgagttcgacggctacctgatcccgaaaggatggcaggtgttctgggtggcgagcgtgacgcacatggacccgggcatcttcccggagccggccaggtttgagccgtctcggttcgagaaccaatcgccgccgtgctcgttcgtcgcgttcggcgggggtccgaggatctgcgtcggcatggagttcgccaggatcgagacgctggtgacgatgcattacctcgtcaggcgatttaggtggaaactctgctgcaagaaggacacgtatgccagggaccccatgccattgccgctgcacggactgcccatacaacttgagcacaaggtatcgccatgtgtcatgtga

SEQ ID NO: 1074 - protein, 483 aa, Sorghum bicolor
  misc_feature: Ceres Annot ID no. 8722834
  misc_feature (1)..(483): Bit score of 304.4 for hmm based on sequences of FIGURE 7.
  misc_feature (36)..(476): Pfam Name: p450 Pfam Description: Cytochrome P450
  misc_feature: Functional Homolog Of SEQ ID NO. 441
MDSSLILALILAVALALLLHLLTSANNKPRRAKQVPPGSLGLPVIGQSLSLLRAMRANSGERWIQDRIHRYGPVSKLSLFGAPTVLLAGPAANKFTFFSRALAMQQPRSVQRILGEKSILELVGADHKRIRGALAEFLKPDMLRLYVGKIDGEVRRHLDERWAGRTTVTVMPLMKRLTFDIISLLLFGLQRGAPLQDALAADFARVMDGIWAVPVNLPFTAFSRSLRASARARRLIAGILRETRAKLETGEASRSSDLIACLLSLTDHHSGAPLLSDKEIVDNSVVALVAGHDTSSILMTFMVRQLANDPDTLAAMVQEHDDIAKSKGDGEALDWEDLAKMKYTWRVALETLRLVPPMFGDFRRALQDVEFDGYLIPKGWQVFWVASVTHMDPGIFPEPARFEPSRFENQSPPCSFVAFGGGPRICVGMEFARIETLVTMHYLVRRFRWKLCCKKDTYARDPMPLPLHGLPIQLEHKVSPCVM

SEQ ID NO: 1075 - DNA, 1446 bp, Sorghum bicolor
  misc_feature: Ceres Annot ID no. 8655960
  misc_feature: Encodes the peptide sequence at SEQ ID NO. 1076
atggattcctcctctcttgtcctagcgctcatcgccgtcgccttgcccgtcctcctccatctcctaacgaggccaaacaagccacggcggccggccgcggccaagctactacccccgggctcgctgggcctgccggtgatcggccagagcctgagccttctccgcgccatgcgcgccaacaccgccgagcggtggatccaggaccggatccaccggtacggcccggtgtccaagctgtcgctgttcggcgcgccgacggtgctcctcacggggcccgccgccaacaagttcatcttcttcagcagcgccctggcgctgcagcagccccggtcagtgcagaggatcctcggggacgagagcatcctggacctgatgggcgccgaccacaagcgggtccgcggcgcgctggccgagttcctcaagccggacatgctgaggctgtacgtgggcaagatcgacggcgaggtgcggcgccacctcgacgagcgctgggccggccagcgcgccgtcacggtgatgccgctcatgaagaggctcacgttcgacatcatctccctgctgctcttcggcctggagcggagcccgctccaggacgcgctcgccgccgacttcgcgggcgtcatggatggcatgtgggccgtcccggtgaacctgccgttcacggcgttcagccggagcttcagggccagcgccagagctcgccggctcatcgccgggatcgcgcgggagaccagggccaagctgcacagcggcgaggcctcccggagcagcgacctcatcgcgtgcctgctcagtctgaccgaccacaccggcgcgccgctgctgagcgacaaggagatcgtggacaactccatggtggccctcatcgccggccacgacacgtcgtccatcctcatgaccttcatggtccgccacctcgccaacgacccggacaccctcgccgccatggtccaagagcacgaggagatcgcaaagagcaagggcgacggcgaggccctggactgggaggacctggcgaagatgaagtacacgtggcgcgtcgcgctggagacccttcgcctggtgccccccatcttcggcaacttccggcgagcgacacaggacgtcgagttcgacggctacctcatcccaaaaggatggcaggtgttctgggcggcgagcgtgacgcacatggacacgggcatcttccacgagccggccaagttcgacccgtctcggttcgagaaccagtcggcgccaccgtgctcgttcgtcgcgttcggcgggggtccgaggatctgcgtcggcatggagttcgccaggatcgagacgctggtgacgatgcattacctcgtcaggggatttaggtggaagctctgcagcaagaacgacacctttgccagggaccccatgccgtcgccgctgcacggcctgcccatagagctcgagcagaagggatcgccgtga

SEQ ID NO: 1076 - protein, 481 aa, Sorghum bicolor
  misc_feature: Ceres Annot ID no. 8655960
  misc_feature (1)..(481): Bit score of 291.8 for hmm based on sequences of FIGURE 7.
  misc_feature (38)..(477): Pfam Name: p450 Pfam Description: Cytochrome P450
  misc_feature: Functional Homolog Of SEQ ID NO. 441
MDSSSLVLALIAVALPVLLHLLTRPNKPRRPAAAKLLPPGSLGLPVIGQSLSLLRAMRANTAERWIQDRIHRYGPVSKLSLFGAPTVLLTGPAANKFIFFSSALALQQPRSVQRILGDESILDLMGADHKRVRGALAEFLKPDMLRLYVGKIDGEVRRHLDERWAGQRAVTVMPLMKRLTFDIISLLLFGLERSPLQDALAADFAGVMDGMWAVPVNLPFTAFSRSFRASARARRLIAGIARETRAKLHSGEASRSSDLIACLLSLTDHTGAPLLSDKEIVDNSMVALIAGHDTSSILMTFMVRHLANDPDTLAAMVQEHEEIAKSKGDGEALDWEDLAKMKYTWRVALETLRLVPPIFGNFRRATQDVEFDGYLIPKGWQVFWAASVTHMDTGIFHEPAKFDPSRFENQSAPPCSFVAFGGGPRICVGMEFARIETLVTMHYLVRGFRWKLCSKNDTFARDPMPSPLHGLPIELEQKGSP

SEQ ID NO: 1077 - DNA, 1518 bp, Sorghum bicolor
  misc_feature: Ceres Annot ID no. 8734549
  misc_feature: Encodes the peptide sequence at SEQ ID NO. 1078
atgctcggcgaggaggcggcgctgctgtcgtgggccgcggcgctgctgctgggcgccgccgcgttggtgctcgtggacgcggcggcgcggtgggcgcacgggtggtacagggaggcgcctctgggcgcggcgcggcgggcgcggctgccgccgggggagatggggtggcccgtcgtcggcggcatgtgggcgttcctccgcgccttcaagtccggcaagcccgacgccttcatcgcctccttcgtccgacggttcgggcgcacgggcgtgtaccgaggcttcatgttcagcagcccgacggtgctggtgacgacgccggaggcgtgcaagcaggttctgatggacgacgacgcgttcgtgacgggttggcccaaggcgacggtggcgctgatcggtcccaagtcgttcgtggcgatgccgtacgacgagcaccggcggctgcgcaagctcacggccgcgcccatcaacggcttcgacgcgctcaccgcgtacctgcccttcatcgaccgcaccgtgacgtcgtcgctgcgcgcgtgggccgacgagtcgtcttccggcgccggcgccgggacgggggtcgagttcctgacggagctccggcggatgacgttcaagatcatcgtgcagatcttcctgggcggcgcggacgagcccacgacgcgtgcgctggagcggagctacacggacctcaactacgggatgcgcgccatggccatcaacctgcccgggttcgcgtaccacagggcgctgcgcgcgcggcggcgcctcgtggccgtgctgcagggcgtgctggacgagcggcgcgccgcgaaggccaagggggtgtcgggtgccggcgtggacatgatggaccggctgatcgaggcggaggacgagcgcgggcggcggctggacgacgacgagattatcgacgtgctcatcatgtacctcaacgccgggcacgagtcgtcggggcacatcaccatgtgggccaccgtgttcctgcaggagaacccggacatcttcgcaaaggcaaaggcggagcaggaggcgatcatgaggagcatcccggcgtcgcagcaggggctcacgctcagggacttcaggaagatggagtacctctcacaggtgatcgacgagacgctgcggctcgtcaacatctccttcgtctccttccgtcaggccaccaaagacgtcttcgtgaacgggtacctgatccccaaggggtggaaggtgcagctgtggtaccggagcgtgcacatggacccacaggtgtaccctgaccccaccaagttcaacccgtcaagatgggagggccactcgccgagagccggcactttcctggcgttcgggctcggcgccaggctctgccccggcaacgacctcgccaagctcgagatctccgtcttcctccaccacttcctcctcggctacaggctggcgaggacgaaccctaggtgccgggtgaggtacctgccgcatccgaggccggtggacaattgcttggccaagatcaccagagtctccgaagaatactag

SEQ ID NO: 1078 - protein, 505 aa, Sorghum bicolor
  misc_feature: Ceres Annot ID no. 8734549
  misc_feature (1)..(505): Bit score of 239.2 for hmm based on sequences of FIGURE 7.
  misc_feature (50)..(495): Pfam Name: p450 Pfam Description: Cytochrome P450
  misc_feature: Functional Homolog Of SEQ ID NO. 441
MLGEEAALLSWAAALLLGAAALVLVDAAARWAHGWYREAPLGAARRARLPPGEMGWPVVGGMWAFLRAFKSGKPDAFIASFVRRFGRTGVYRGFMFSSPTVLVTTPEACKQVLMDDDAFVTGWPKATVALIGPKSFVAMPYDEHRRLRKLTAAPINGFDALTAYLPFIDRTVTSSLRAWADESSSGAGAGTGVEFLTELRRMTFKIIVQIFLGGADEPTTRALERSYTDLNYGMRAMAINLPGFAYHRALRARRRLVAVLQGVLDERRAAKAKGVSGAGVDMMDRLIEAEDERGRRLDDDEIIDVLIMYLNAGHESSGHITMWATVFLQENPDIFAKAKAEQEAIMRSIPASQQGLTLRDFRKMEYLSQVIDETLRLVNISFVSFRQATKDVFVNGYLIPKGWKVQLWYRSVHMDPQVYPDPTKFNPSRWEGHSPRAGTFLAFGLGARLCPGNDLAKLEISVFLHHFLLGYRLARTNPRCRVRYLPHPRPVDNCLAKITRVSEEY

SEQ ID NO: 1079 - DNA, 1533 bp, Sorghum bicolor
  misc_feature: Ceres Annot ID no. 8721897
  misc_feature: Encodes the peptide sequence at SEQ ID NO. 1080
atggcgagttcccgcggtggcatcgacgagattctaggaattagtttggccacaatccagaaacacaacgaaccaagaatatcaaacaaggtttacatggctgcaagaaaggaaaggcctttgtttaccgctggccaagcaaccagtgtcagaataacaagatctcaggctgctgcaaatcgtacaagatctgggctggctccttatgtaccactacccctgaaaactgagtataaacatgcagtgaaaggaaagatgaaaagggaagcttcaggtgaaaatgctgatgctggagcttcagctcctcagcctaaaaggcgcacagttctcaagaatgtaactaacataagctgtgctaaaacttccaaaaggtgcaatactgtgactgggctgaagaaggttggacagagcataaacaagcaatgcacaaacaagatccccaagcttctccctctggctgttggggggagctcacttgtcaatgattctagtagtgctgaagaaacacaaaaggtagaccttttggcacagaaagagaagcagattgttttgcttaagggggctcagccattacacaatactgaacagaacaaagccggcgcttgtaatgagacattcgttgagggaagaaatgccaggaatgtacttgaaactgctgccttaaaggctggagtctctaatggtttaaacattgtagacattgacaaaaataatggtgatccccaaatgtgtgttacctacgttgcagagatatatagaaatctaatggcctcagagcttataagaagacctaggtcaaattacatggagactttgcaacaggacatcacagctagcatgcgaggtgttctaattgattggcttgttgaggtttctgaggaatataagcttgtggcagatacactttaccttgcagtacatcttattgaccaatttctttctcagaactgtattcagacacggaaactacaacttcttgggataactagtatgctgattgcctcgaaatatgaagagtattctgctcctagtgctgaagaattttgtaacataacagatagtacatatgcaaaggctgaggttctggaattggaacaacatgtgcttaatgatgtgggctttcatttatctgttccaacaacaaacacatttctcaggagattcctcagagcagcacaggcttcttgtatagctcctttggtccctttgacttatctggcgaattatctcgctgagttgactttaatcagctacggtttcctgaaatttcttccatcagtggtggcagcatcttcagttttccttgcaaaatggacgcttgaccaatctgaccatccttggaaccctactcttgagcactacacctcttacaaaagctccaatcttagaagttgcgtgcgggctctacaggaactgcagcacaataccagcaattgcccccttaacgccatccgtgaaaagtatgggcagcaaaagttcgagtgtgttgccaacctgaggtcaccggagctgctgcagtcactcttcagttga

SEQ ID NO: 1080 - protein, 510 aa, Sorghum bicolor
  misc_feature: Ceres Annot ID no. 8721897
  misc_feature (1)..(510): Bit score of 1076.6 for hmm based on sequences of FIGURE 9.
  misc_feature (250)..(377): Pfam Name: Cyclin_N Pfam Description: Cyclin, N-terminal domain
  misc_feature (379)..(506): Pfam Name: Cyclin_C Pfam Description: Cyclin, C-terminal domain
  misc_feature: Functional Homolog Of SEQ ID NO. 764
MASSRGGIDEILGISLATIQKHNEPRISNKVYMAARKERPLFTAGQATSVRITRSQAAANRTRSGLAPYVPLPLKTEYKHAVKGKMKREASGENADAGASAPQPKRRTVLKNVTNISCAKTSKRCNTVTGLKKVGQSINKQCTNKIPKLLPLAVGGSSLVNDSSSAEETQKVDLLAQKEKQIVLLKGAQPLHNTEQNKAGACNETFVEGRNARNVLETAALKAGVSNGLNIVDIDKNNGDPQMCVTYVAEIYRNLMASELIRRPRSNYMETLQQDITASMRGVLIDWLVEVSEEYKLVADTLYLAVHLIDQFLSQNCIQTRKLQLLGITSMLIASKYEEYSAPSAEEFCNITDSTYAKAEVLELEQHVLNDVGFHLSVPTTNTFLRRFLRAAQASCIAPLVPLTYLANYLAELTLISYGFLKFLPSVVAASSVFLAKWTLDQSDHPWNPTLEHYTSYKSSNLRSCVRALQELQHNTSNCPLNAIREKYGQQKFECVANLRSPELLQSLFS

SEQ ID NO: 1081 - DNA, 2102 bp, Zea mays
  misc_feature: Ceres Clone ID no. 1396170
  misc_feature: Encodes the peptide sequence at SEQ ID NO. 1082
gtcccgaaaagggcaacgaaatccagacaccgctccccatctcccctkccttcctttcctactcccacactcgcccaccctccactagtactagtactagtaccacaaccaccccaccgggaaaaaacccaacaaggggtaggggcgccgccgccgccagcgccgccgtgcagatcgcggccggagctacggcgctggggcacgggggtccccggatcgaccacgcctccgccgagggttcggatggctatgcgaaaagaaaaccctgtgcttaatgcttgtcaagcatccaatgggcggatcacgcgagctcaagctgctgcaaatcgtcgaagctttggagctttcccttctggtccattgcctgcaaaaaccgaacgaaaacagactgcacaagggaaggcaaaacgaggttcttcatatgacaacaccagtgcaagcgttgcactttcaggcccccagcctaaaaggcgcacagtactcagggatgtgaccaatttgagcaatgctaactctaacaaaagttttgctgctgcaccgaagcttcagacaaagccctctctaaggactggaagaaccgtgagcaaaagcaagccgtgcgcaaaaaagattcctaaaaaaccaccaccagctggtaatggaagtgcattgactaatgttttgaacattgctgaagaaacacaagcggagaagattttggcagagagagtggaacccgttctgttgcttgagaacagggggccactgtcattgcagaatgttgaaaggaacagggacagtgcttgtcatgaggtattctttgaggaaagaaacctcagggataaatgtgaaccttctgtgtcaaagaatggggactcttatgtgttagacattgtagatatcgacaaagataatggcaatcctcaaatgtgtgcttcctacgttgtggagatatactcaaacctaatggcttcagagcttatgagaagaccaagtccaaattacatggagggtttgcaacgggacatcacaaagggcatgagagaaatactcattgattggcttgtggaggtttctgaagaatacaagcttgttccagacacgctgtacctaactgtatatcttattgaccggtttctttctcggaactacattgaaagacagagactacaacttgtgggaataacaagcatgcttgttgcctcgaaatatgaagagatatgtgctcctcgagtagaagagttctgtttcataaccgacaatacatacacaaaagcagaggtgctgaaaatggagagccagctgctgaatgacctgggatttaacctttctgttccaacaacaaaaacatttctcaggagattccttagagcggcacaagcatctcgtaaaactccttctatgactttaggatttctggccaattatctcgcggagttgactttgaccgaatatgagttcttgaaatttcttccgtcgttggtggcagcatcggccgtgtttctcgctagatggacgcttgaccaatccgaccttccatggaaccagactctagagcactacacctcttacaaatgctctgacattcaattgtgtgtctgtgctctacgggaactccagcataacaccagtaactgccctcttaacgccatccgcgagaagtacaggcatcaaaagtttgaatgcgtagcgaacctaacttcaccggagttccctgggtcgttcttcagctgacacgccaatggcaccgattgatgagcaacgttagcagcagccgtagcgcaggttgtgttaacattattgtagcatccccttttaccccccaatgtctgatttggctgtgtgttgttatcgagctgctgtgtcccggcctggcctttttggagtcgcaagtgagatgaagaaggacagagagatggctccttggcttttcttttgtttgtttgacgtaaaaggttcacccggttttaaacaacactgtgtgtagggctttttgcttgggctgttgttaactgtaaggggagatggtccggctggcttgtatgacgacaaacgacgggatgatgtttgtgttgacacaattcgttcattggtagcttcggtaatggaaattagtttattgc

SEQ ID NO: 1082 - protein, 489 aa, Zea mays
  misc_feature: Ceres Clone ID no. 1396170
  misc_feature (1)..(489): Bit score of 1020.8 for hmm based on sequences of FIGURE 9.
  misc_feature (229)..(356): Pfam Name: Cyclin_N Pfam Description: Cyclin, N-terminal domain
  misc_feature (358)..(484): Pfam Name: Cyclin_C Pfam Description: Cyclin, C-terminal domain
  misc_feature: Functional Homolog Of SEQ ID NO. 764
MAMRKENPVLNACQASNGRITRAQAAANRRSFGAFPSGPLPAKTERKQTAQGKAKRGSSYDNTSASVALSGPQPKRRTVLRDVTNLSNANSNKSFAAAPKLQTKPSLRTGRTVSKSKPCAKKIPKKPPPAGNGSALTNVLNIAEETQAEKILAERVEPVLLLENRGPLSLQNVERNRDSACHEVFFEERNLRDKCEPSVSKNGDSYVLDIVDIDKDNGNPQMCASYVVEIYSNLMASELMRRPSPNYMEGLQRDITKGMREILIDWLVEVSEEYKLVPDTLYLTVYLIDRFLSRNYIERQRLQLVGITSMLVASKYEEICAPRVEEFCFITDNTYTKAEVLKMESQLLNDLGFNLSVPTTKTFLRRFLRAAQASRKTPSMTLGFLANYLAELTLTEYEFLKFLPSLVAASAVFLARWTLDQSDLPWNQTLEHYTSYKCSDIQLCVCALRELQHNTSNCPLNAIREKYRHQKFECVANLTSPEFPGSFFS

SEQ ID NO: 1083 - DNA, 1569 bp, Solanum lycopersicum
  misc_feature: Ceres Annot ID no. 8460774
  misc_feature: Encodes the peptide sequence at SEQ ID NO. 1084
atggcaactggatcttctaatcttaaagtgcctactatgcgaatcacaagagcacgggcaaaaaccttgggttcatcaggaggactaccacctctacacccatctgtcagacaggataagaaacagggacttgtaacacaaggaacaaaatccaaaagaccagccccagatgagaacaaaccagctaattcttccagtactgcttctcaacagcctaagcgaagggctgttctcagggatgtcactaatgtgctttgtgaaaatccgtacatgaattgcatcaatggaagcaaatttcaggttaagaaattctctgataagaggaattcaaaggtgacacctgctcttttggtgaaaaagcctgagcttgaagatagaaaagagagtgtgattgaagaagcaaaaatggtaaaggttgaggaatcacaagaacactgttcacaagcacacttcaaggaccacccatttactcagccaagtgaatatatcaccgccgctcaaagtggtttagttgatcttatgcctgtgaataggagttcatgtaatgacattaccctccagactacaacaccaaaagatgaaagcaaggtttgcttgaaacaggaaggctccaattcgcttagtattgcagatatagattcaaaacacaaggatccactaatgtgtagtctgtatgctcctgatatatataacaatttgcaagccatggagcttgaccggcggccttcctttaattatatggaaaagcttcagcgggacattaacaagggtatgcgaagtattcttattgattggcttgtggaggtatctgaagaatataggctggttccggacactctttacctgactgtacatcttattgataggttcctttctgagcattacattgaaaaacaaaaactgcagctgcttggagttacctgcatgctaattgcttccaaatatgaagaaatttgtgcacctcgtgtggaagaattttgctttattacagacaacacttactcgaaagaagaggtagtaagaatggaaagtctggttctgaattttttgggctttcaacttgctgctccgaccaccaaaaagttcctgaggagattcgttcaagcatcacaagcttcttatgaggttccctctgttgaactggaattcatggcaaactatttagcagagttaacactagctgaatatagttttctcaagtttcttccatctgttactgctgcatcagctgtatttctagccagatggacacttgatcaatctaaccacccatggaattcaactttggagcactacactacatataaggcgtcagatctgaaaactacagttcttttgctgcaagatttacagatgaacaccagtggaagcactctgaatgccatccgtgaaaagtataaacaaccaaagcttccatttgaattgacagttcaagtccgtggcaactttatcgtctccaaaaccagtccaatcactgttctaggaaatgctgattttaagtctcggtggccaatccatgtttggcagatccagtgtcactttttcaagcgaaggaacattaatctttaa

SEQ ID NO: 1084 - protein, 522 aa, Solanum lycopersicum
  misc_feature: Ceres Annot ID no. 8460774
  misc_feature (1)..(522): Bit score of 988.7 for hmm based on sequences of FIGURE 9.
  misc_feature (228)..(355): Pfam Name: Cyclin_N Pfam Description: Cyclin, N-terminal domain
  misc_feature (357)..(483): Pfam Name: Cyclin_C Pfam Description: Cyclin, C-terminal domain
  misc_feature: Functional Homolog Of SEQ ID NO. 764
MATGSSNLKVPTMRITRARAKTLGSSGGLPPLHPSVRQDKKQGLVTQGTKSKRPAPDENKPANSSSTASQQPKRRAVLRDVTNVLCENPYMNCINGSKFQVKKFSDKRNSKVTPALLVKKPELEDRKESVIEEAKMVKVEESQEHCSQAHFKDHPFTQPSEYITAAQSGLVDLMPVNRSSCNDITLQTTTPKDESKVCLKQEGSNSLSIADIDSKHKDPLMCSLYAPDIYNNLQAMELDRRPSFNYMEKLQRDINKGMRSILIDWLVEVSEEYRLVPDTLYLTVHLIDRFLSEHYIEKQKLQLLGVTCMLIASKYEEICAPRVEEFCFITDNTYSKEEVVRMESLVLNFLGFQLAAPTTKKFLRRFVQASQASYEVPSVELEFMANYLAELTLAEYSFLKFLPSVTAASAVFLARWTLDQSNHPWNSTLEHYTTYKASDLKTTVLLLQDLQMNTSGSTLNAIREKYKQPKLPFELTVQVRGNFIVSKTSPITVLGNADFKSRWPIHVWQIQCHFFKRRNINL

SEQ ID NO: 1085 - DNA, 1464 bp, Sorghum bicolor
  misc_feature: Ceres Annot ID no. 8744641
  misc_feature: Encodes the peptide sequence at SEQ ID NO. 1086
atggatggaaggtgggagcgggaggagatggatgacacatgggctttgcgcgaggataaaaaggtttggatggctgcacggaaagaaaaccctgagcttattgcttgtcaagcacccaatggtcgaatcacgcgagctcaagccgctgcaaatcgtcgaagctttggtgttctcccttctgttccactgcctgcaaaaactgatcgaaaacagactacacaagggaagatgaaaaggggatcttcatatgacaacactagtgcaagtactgcaatttctggcccccagcctaagaggcgcacagttctcagggatgtgaccaatttgcgtaatgctaactctaacaaaacttttgctgctgcaccgaaggttcagacaaggccctccctaaggactggaagaaccgtgaccagaggcaagcagtgcacaaaaaggattcctaaaataccccaaccagctggtaatggtggttcattcgccaatgattcgagcattgccgaagaaacacaagagaaacttttggcacagaaagaagaacctattcttttgcttgagaacaggggctcactgtcattgcagaatgttgaaaggaacagggacagtgcttgtcatgaggcattctttaaggaaagaaatgtcagggatatatgtgaaccttctgtgtcaaagaatggggactcttctgtgttagacattgtagatatcgacaaagataatggcaatcctcaaatgtgtgcttcctacgttgtagagatatactcaaaccttatggtttcagagcttatgagaagacccagtccgaattacatggagggtttgcaacgggacatcactaagggcatgagaggaatactcattgattggcttgtggaggtttctgaagaatacaagcttgttccagacacgctgtacctaactgtatatgttattgaccgaaagtatgaagagatatgtgctcctcgagttgaagaattctgtttcataaccgacaatacatacacaaaggcagaggtgctgaaaatggagtgccaagtgctgaacgacctgggatttcatctttctgttccaactacaaaaacatttctcaggagattccttagagcggcacaagcatctcgtaaaattccttctatgactttgggatttctggccaattatcttgcggagttgactttgaccgattatgagttcttgaaatttcttccatcattggtggcagcatcggctgtgtttcttgctagatggacacttgaccaatccgacgaaccatggaaccaaactctagagcactacacctcttacaaatgctctgacattcaattatgtgtctgtgctctacgagaactccagcataacaccagtaactgtcctcttaacgccatccgtgagaagtacaaacatcaaaagtttgattgcgtagcaaacctaacctcaccggagctccctcggtcgctcttcagctga

SEQ ID NO: 1086 - protein, 487 aa, Sorghum bicolor
  misc_feature: Ceres Annot ID no. 8744641
  misc_feature (1)..(487): Bit score of 931.3 for hmm based on sequences of FIGURE 9.
  misc_feature (356)..(483): Pfam Name: Cyclin_C Pfam Description: Cyclin, C-terminal domain
  misc_feature (251)..(354): Pfam Name: Cyclin_N Pfam Description: Cyclin, N-terminal domain
  misc_feature: Functional Homolog Of SEQ ID NO. 764
MDGRWEREEMDDTWALREDKKVWMAARKENPELIACQAPNGRITRAQAAANRRSFGVLPSVPLPAKTDRKQTTQGKMKRGSSYDNTSASTAISGPQPKRRTVLRDVTNLRNANSNKTFAAAPKVQTRPSLRTGRTVTRGKQCTKRIPKIPQPAGNGGSFANDSSIAEETQEKLLAQKEEPILLLENRGSLSLQNVERNRDSACHEAFFKERNVRDICEPSVSKNGDSSVLDIVDIDKDNGNPQMCASYVVEIYSNLMVSELMRRPSPNYMEGLQRDITKGMRGILIDWLVEVSEEYKLVPDTLYLTVYVIDRKYEEICAPRVEEFCFITDNTYTKAEVLKMECQVLNDLGFHLSVPTTKTFLRRFLRAAQASRKIPSMTLGFLANYLAELTLTDYEFLKFLPSLVAASAVFLARWTLDQSDEPWNQTLEHYTSYKCSDIQLCVCALRELQHNTSNCPLNAIREKYKHQKFDCVANLTSPELPRSLFS

SEQ ID NO: 1087 - protein, 486 aa, Physcomitrella patens subsp. patens
  misc_feature: Public GI ID no. 168027686
  misc_feature (1)..(486): Bit score of 574.6 for hmm based on sequences of FIGURE 9.
  misc_feature (222)..(349): Pfam Name: Cyclin_N Pfam Description: Cyclin, N-terminal domain
  misc_feature (351)..(478): Pfam Name: Cyclin_C Pfam Description: Cyclin, C-terminal domain
  misc_feature: Functional Homolog Of SEQ ID NO. 764
MTGVVESARRLRSRSSSSLSVPTADEVRQTRAAAKRSVMEETSSRPGNSTVHPSKRVGAQPVRKRAALSNISNQHYVIPSGRPMVGLADVKSVDLKASQITRGDENLHSVNRAQPTVKGAHLEAALECEIERDSRSDSEAIASLERRTVQNLYISQEAKDRVKQGTIVREIMPLTLVISRHVGNLFSDKSFSVTPELPGIVAYQDIDNDHSDPQMCSTYATDIYSYLRMAEIKRRPSGNFMESMQQDINPTMRGILVDWLVEVAEEYKLVPDTLYLTVSYIDRYLSLHVVTRQRLQLLGVACMLIAAKYEEICAPQVEEFCYITDNTYCREEVLEMERAVLNVLKFELTTPTTKSFLRRFIRAAQASYKTPTLVLEFLGNYLAELTLLEYGFLPFLPSMIAASAVYLAKITLDSSTCPWDATLQHYTGYRPSELGHCVKAIHELQRNTDSCSLPAVREKYRQHKFKCVATLAPPAVLPEEYFLDRD

SEQ ID NO: 1088 - protein, 509 aa, Zea mays
  misc_feature: Public GI ID no. 194707250
  misc_feature (1)..(509): Bit score of 472.7 for hmm based on sequences of FIGURE 9.
  misc_feature (244)..(371): Pfam Name: Cyclin_N Pfam Description: Cyclin, N-terminal domain
  misc_feature (373)..(500): Pfam Name: Cyclin_C Pfam Description: Cyclin, C-terminal domain
  misc_feature: Functional Homolog Of SEQ ID NO. 764
MSTIAASRRSSSSSSSATAKRPAIADGPGGPKATAAQAKKRVALGNITNVAARGGRASVGGSLGNVMAPTSSAKLNPTVPLKKPSLATSARSVSSSIRGSADKPASIKPAPPVARHGSATQRHNNVPPPKVPTIADVPSRAPALVSCTGLVSPGRSGDSVSSDETMSTCDSMKSPDFEYVDNQDTSMLASLQRRTSEHLRISEDRDVEENKRKKNAVAPMEIDRICDVDSEYEDPQLCATLASDIYMHLREAETKKRPSTDFMETIQKDVNPSMRAILIDWLVEVAEEYRLVPDTLYLTVNYIDRYLSGNEISRQRLQLLGVACMLIAAKYEEICAPQVEEFCYITDNTYFRDEVLDMEASVLNYLKFEMTAPTAKCFLRRFARAAQACDEDPALHLEFLANYIAELSLLEYSLLSYPPSLIAASAIFLARFILQPTKYPWNSTLAHYTQYKPSKLSECVKALHRLCSVGSGSNLPAIREKYSQHKYKFVAKKQCPPQIPTEFFRDTTC

SEQ ID NO: 1089 - protein, 476 aa, Vitis vinifera
  misc_feature: Public GI ID no. 157336075
  misc_feature (1)..(476): Bit score of 451.7 for hmm based on sequences of FIGURE 9.
  misc_feature (211)..(338): Pfam Name: Cyclin_N Pfam Description: Cyclin, N-terminal domain
  misc_feature (340)..(467): Pfam Name: Cyclin_C Pfam Description: Cyclin, C-terminal domain
  misc_feature: Functional Homolog Of SEQ ID NO. 764
MKRSSSDNHGKVTTVPSHLAKKRPPLSNITNQKNASLSGLKSSAAVGTMVPCAEKISKAKRGSSKISRSVGITGNTSSASLNVKPTAVIPCKDTSLPKSDGTASTVTALPDPCSLDVSPNRSDGISASMDETMSTCDSFKSPEVEYMDVDDLAVNSIERKTCSKLYISEHVEAEGNICSEDIHVETETNGKIADIDDNFGDPQFCATMACDIYKHLRASEARKRPSTDFMERIQKDVNASMRSILIDWLVEVAEEYRLVPDTLYLTVNFIDRYLSGNVMNRQQLQLLGVACMMIAAKYEEICAPQVEEFCYITDNTYFKEEVLQMESSVLNYLKFEMTAPTAKCFLRRFVRAAQGMNEVPSLQLECLANYIAELSLLEYSMLCYAPSLIAASAIFLANYILLPSKRPWNSTLRHYTLYQPSDLCDCVKALHRLCCNNHNSSLPAIREKYSQHKYKFVAKKYCPPSIPSELFHNLSN

SEQ ID NO: 1090 - protein, 502 aa, Zea mays
  misc_feature: Public GI ID no. 194691894
  misc_feature (1)..(502): Bit score of 439.2 for hmm based on sequences of FIGURE 9.
  misc_feature (237)..(364): Pfam Name: Cyclin_N Pfam Description: Cyclin, N-terminal domain
  misc_feature (366)..(493): Pfam Name: Cyclin_C Pfam Description: Cyclin, C-terminal domain
  misc_feature: Functional Homolog Of SEQ ID NO. 764
MSTHAASRRSSSSSAVAKRPAIAEGATKAAGPGPTAAQAKKRTALVNITNVAAPGARVAAVGKVAPPVTGAKLNPATSGAPLKKPSLANARTIRGSAAKSASIKPAPPVSRHDSSSEQKHNVLVPTTVHVPSRAPALVPYSSFVSPGRSRDSVSTDETMSTCDSMKSPDFEYIDNGGCSMLASLQRRADEHLRTSEDRDVEENKWKKNGPAPMEIDSICEVDSNLEDPQLCAALASDIYMHLREAEMKKRPSTDFMKTIQKDVNPSMRAILIDWLVEVAEEYRLAPDTLYLTVNYIDRYLSGNEINRQRLQLLGVACMLIAAKYEEICAPQVEEFCYITDNTYFRDEVLEMEASVLNYLKFEMTAPTAKCFLRRFARSAQACDEDPALHLEFLANYIAELSLLEYSLLSYPPSLIAASAIFLARFVLQPTKYPWNSTLAHYTQYKPSELSECVKTLHRLSSVGPGSNLPAIREKYSQHKYKFVAKKQCPPQIPAEFFRDAAC

SEQ ID NO: 1091 - protein, 365 aa, Vitis vinifera
  misc_feature: Public GI ID no. 157335598
  misc_feature (1)..(365): Bit score of 398.5 for hmm based on sequences of FIGURE 9.
  misc_feature (98)..(227): Pfam Name: Cyclin_N Pfam Description: Cyclin, N-terminal domain
  misc_feature (229)..(356): Pfam Name: Cyclin_C Pfam Description: Cyclin, C-terminal domain
  misc_feature: Functional Homolog Of SEQ ID NO. 764
MADQENSVRITRAAKKRAAAAMAASDSLQLPPNKKRVVLGELPNLSNVAATPAAVPASGAQKQKFRPKKKEKVKAAVVAPDVGAKSDDPQMCGPYATDIYEYLHSMEMEPKRRPLHDYIEKVQKDVSHNMRGILVDWLVEVAEEYKLASDTLYLTISYIDRFLSSKALNRQRLQLLGVSSMLIAAKYEEISPPHVEDFCYITDNTYTKEEVVKMEADILKSLNFEMGNPTIKTFLRRFTRIAQENYKTPNLQLEFLVYYLAELSLLDYGCVKFLPSMVAASVIFLSRFTLRPKTHPWCSSLQHHSGYKPSELKECVLIIHDLQLSRRGGSLVAVREKYKQHKFKCVATLSSPSVIPVSYFEDIKE

SEQ ID NO: 1092 - protein, 357 aa, Zea mays
  misc_feature: Public GI ID no. 194696044
  misc_feature (1)..(357): Bit score of 232.8 for hmm based on sequences of FIGURE 9.
  misc_feature (89)..(218): Pfam Name: Cyclin_N Pfam Description: Cyclin, N-terminal domain
  misc_feature (220)..(348): Pfam Name: Cyclin_C Pfam Description: Cyclin, C-terminal domain
  misc_feature: Functional Homolog Of SEQ ID NO. 764
MADMQNYAAPPLLTHATAKRKRVALNQLPTLPNAVLGAHDEGGGGDDKPVKKQHLLPAAKPEPNAAPAPAAAASDVEEDPQLRKPYASDIYSYLRSTESQATRRPATDYIAAVQVDVTPNTRAILVDWLVDVSEEYRFVSDTLYLTVSYIDRFLSANALNRQKLQLLGVAAMLIASKHEEISPLNVEDFCYITDNTYTKQEVVKMESDILNVLKFEMGNPTPKTFLRMFTRFSKEDTKKYRSLQLEFLGSYLCELSLLDYSLLRFLPSLVAASVLFVARLTLDPHTHPWSKKMQTLTGYKPFELKDCVAAIHHLQLNRKYSSMMATRDKFKERRFKGVSALLPPVEIPASYFEKLKE

SEQ ID NO: 1093 - DNA, 1427 bp, Zea mays
  misc_feature: Ceres Clone ID no. 333936
  misc_feature: Encodes the peptide sequence at SEQ ID NO. 1094
cctccgcttctcttccgtggtctggcgtctatccacctgctcctgcggtcctgcccccgctgctgcctgctgccgtgcagggacagccggagcaggagcaacgccgcccgccttcaccgtcgtcgcccatggccgacatgcaaaactacgccgccccgccgctcctcacccacgctaccgccaagcgcaagcgtgtcaccctcaaccagctgcccacgctccccaacgccgtgctcggcgcgcacgacgaaggcggcggcggcgatgacaagcccgtcaagaagcagcacctcctccccgccgccaagcccgagcccaatgcagctcccgcgcctgccgccgccgcctctgatgtcgaggaggacccgcagctccgcaagccctacgcgtccgacatctactcctacctccgctccacggagtcgcaggccacgcgccgccccgccacggattacatcgcggcggtgcaggtcgacgtcacgcccaacacgcgggccatcctcgtcgactggctcgtcgatgtctccgaggagtacagattcgtctccgacacgctctacctcaccgtctcctacatcgaccgcttcctctccgccaacgcactcaacaggcagaagctgcagctcctcggcgtcgccgccatgctcatcgcatccaagcacgaggagatcagcccgctcaatgtggaggatttctgctacatcaccgataacacctacaccaagcaggaggtagttaagatggagagcgatatactgaatgtcctcaagtttgagatgggaaatcctactccaaaaatgttcctgaggatgttcaccagatttagcaaagaagacaccaagaagtatcgtagcctccagctggagttcctgggtagctacctttgtgagctcagcttgctagactacagcttgcttcgcttcttgccgtcacttgttgcagcctcggtgctgtttgttgcaaggctgacccttgatccacacacccatccctggagcaagaagatgcagacactaactggctacaagccatctgagttgaaggactgtgttgctgccatacatcatttgcagctcaaccggaaatattcatccatgatggcgacccgggataaattcaaggaacgcaggtttaagggtgtatcagctttgctaccacctgttgagatcccagcgccatacttcgagaaactgaaggagtagttgttcctggacaatctagtaagccaaacacacagggctaaggttgttaaggtcctgaggttcttcgatgctgcatctaggctcgagtaggtgcattcagagttgatttgtttgaagttcaagctcaatagaaggctaggcgtgtcaaattttgtacttgtgaatcataactgtacattaaaaccaggttcctttatttgttgggggcacaactccaaaactttc

SEQ ID NO: 1094 - protein, 357 aa, Zea mays
  misc_feature: Ceres Clone ID no. 333936
  misc_feature (1)..(357): Bit score of 219.7 for hmm based on sequences of FIGURE 9.
  misc_feature (89)..(218): Pfam Name: Cyclin_N Pfam Description: Cyclin, N-terminal domain
  misc_feature (220)..(348): Pfam Name: Cyclin_C Pfam Description: Cyclin, C-terminal domain
  misc_feature: Functional Homolog Of SEQ ID NO. 764
MADMQNYAAPPLLTHATAKRKRVTLNQLPTLPNAVLGAHDEGGGGDDKPVKKQHLLPAAKPEPNAAPAPAAAASDVEEDPQLRKPYASDIYSYLRSTESQATRRPATDYIAAVQVDVTPNTRAILVDWLVDVSEEYRFVSDTLYLTVSYIDRFLSANALNRQKLQLLGVAAMLIASKHEEISPLNVEDFCYITDNTYTKQEVVKMESDILNVLKFEMGNPTPKMFLRMFTRFSKEDTKKYRSLQLEFLGSYLCELSLLDYSLLRFLPSLVAASVLFVARLTLDPHTHPWSKKMQTLTGYKPSELKDCVAAIHHLQLNRKYSSMMATRDKFKERRFKGVSALLPPVEIPAPYFEKLKE

SEQ ID NO: 1095 - protein, 329 aa, Vitis vinifera
  misc_feature: Public GI ID no. 157334844
  misc_feature (1)..(329): Bit score of 186.0 for hmm based on sequences of FIGURE 9.
  misc_feature (69)..(198): Pfam Name: Cyclin_N Pfam Description: Cyclin, N-terminal domain
  misc_feature (200)..(321): Pfam Name: Cyclin_C Pfam Description: Cyclin, C-terminal domain
  misc_feature: Functional Homolog Of SEQ ID NO. 764
MAEQDNCVHTPGAFRKRASDECPQSTTTKKRVVLEDITNSPNNELIQNSDRESQKPKRGIRRTGGCSSIMYQHLHALEMEEKRRARPDYMEKVQNDVTPNMREILVDWLVEVAEEYKLVSDTLFLCISYIDRFLSSHALRRDKLQLLGVSCMLIASKFEEISPPHAEDFCYITDNHYTAEEVVNMERDVLKFLNFEKVAPTTKNTLNVFPLLSMARLLFFEALSWYLAELSLLDYGCLQFLPSMIAASSIFLARFTLEPNKHPWSLALQRYSGYKPSELKECVLLIHSRQLNRRGNSSLRAIRQKYLQPMVSLPQFISNIHVDIANSAS

SEQ ID NO: 1096 - protein, 421 aa, Chlamydomonas reinhardtii
  misc_feature: Public GI ID no. 159470039
  misc_feature (1)..(421): Bit score of 199.6 for hmm based on sequences of FIGURE 9.
  misc_feature (146)..(272): Pfam Name: Cyclin_N Pfam Description: Cyclin, N-terminal domain
  misc_feature (274)..(398): Pfam Name: Cyclin_C Pfam Description: Cyclin, C-terminal domain
  misc_feature: Functional Homolog Of SEQ ID NO. 764
MSSRVGSSFGVLPSAINYSQEQLLSHLSKSSASQQHQDVSKGVSSNGRAMLGDLTNNGQQRPVAGERKALSALNAGQASFGFPQPVKAQQQPSFHQPSIPLAAFSDPRIIDGASVRSSGDLRKKAWIDVDSLNHEDPQAVSHYAGAIFEYLREAELMRRAIPDYLDSQPEINSKMRSILVDWLVEVSEEYRMVPDTLYYAVNFLDRVLTLQRVSRSQLQLVGITCMWIAAKYEEIYPPNVSEFSYITDNTYSREQLVAMEEEVLRQLKYELTVPTAKTFLRRLLQVCSPDDQLHFVSNYLTEISLMEATMLHFLPSEIAAAAVYLGNLILARAPWSPTLEHYSYYTPAQIAECVEALATLHIQVNSRAQGGELTALYDKYSHSKFLSVSRVSPLPLPVVNQHLSMIMGGSSASGASGIHRS

SEQ ID NO: 1097 - protein, 68 aa, Populus balsamifera subsp. trichocarpa
  misc_feature: Public GI ID no. 118484464
  misc_feature (1)..(68): Bit score of 133.6 for hmm based on sequences of FIGURE 12.
  misc_feature: Functional Homolog Of SEQ ID NO. 200
MGMVVVISLPLIIFCLLLGFGCYYLGRYKGRQDVRTNAQVFGVPIPPPGTASKPPPPPHSKPGNLENV

SEQ ID NO: 1098 - DNA, 632 bp, Zea mays
  misc_feature: Ceres Clone ID no. 1614244
  misc_feature: Encodes the peptide sequence at SEQ ID NO. 1099
tctctgcttggattttagcgagcggcaacgacgagcgacccaatggggttcgagctggtggtctctctgcccttcatcttcctctccatcatcctcggcttcggctgctacttcctcggcaagcacaggggccgggaggagatgcggaccggcgtcggcgcgcagatctacggcacgccgctgccgccgcccggcgtcgtcggagcctcctcgccgccgcctgagccgttccacagcaagaaacaatggtccgaggcagtgtgactgagattcagacgtctctccatccaaccattctactaatactacttatatgtcttggtggtgatgttggatttatattctttcttctttaatttcgccctggctgtcttgagagtgtagattgagagtcaaatatgtgcttgtgtggatgttgagatacgattgcaatcacactttatatcttctgtaatcaagcaaaaaccaatgcgttgcagtagaatggcttgtgtgtgtgactcctgcaggctgtatatgtgtttgaagattgcaactgagcatctccacaagatcttttatacaaaaaaaagtgtggtcccgcagggcgcaccattcacccgtcttccgccgagacaccctgcacggatcgc

SEQ ID NO: 1099 - protein, 73 aa, Zea mays
  misc_feature: Ceres Clone ID no. 1614244
  misc_feature (1)..(73): Bit score of 162.5 for hmm based on sequences of FIGURE 12.
  misc_feature: Functional Homolog Of SEQ ID NO. 200
MGFELVVSLPFIFLSIILGFGCYFLGKHRGREEMRTGVGAQIYGTPLPPPGVVGASSPPPEPFHSKKQWSEAV

SEQ ID NO: 1100 - protein, 271 aa, Populus balsamifera subsp. trichocarpa
  misc_feature: Public GI ID no. 118482768
  misc_feature (1)..(271): Bit score of 600.1 for hmm based on sequences of FIGURE 15.
  misc_feature: Functional Homolog Of SEQ ID NO. 892
MGSDSNAVPSASASASTSTSTSTPSTPNGKRSRDPEDEVYLDNLHSHKRYLSEIMASSLNGLTVGDPLQDNLMESPARSDTMFFARDEMSLQYSPMSEDFDDSRFCETPINACSPQSESLPGSPVSPYRYQRPLCGFSSAPYSSSFSSHGCSVTSSQPRQRGSDSEGRFPSSPSDICHSADLRRAALLRSVQMRTQPTGSSSFELPFSSGHEPGSNMEAEERPCSYMKSLVEEREYPLEECSSMSISEPEFNEEKACRVLNMNIKGDDSGG

SEQ ID NO: 1101 - protein, 292 aa, Zea mays
  misc_feature: Public GI ID no. 194698116
  misc_feature (1)..(292): Bit score of 718.1 for hmm based on sequences of FIGURE 15.
  misc_feature: Functional Homolog Of SEQ ID NO. 892
MAGGSGEAAMSPPSSSASGKRGRDPEEDVYVDNLHSHKRYLSEIMASSLNGLSVGDSLPDNIMESPARSETASCYRDEILSQYSPMSEDSDDYRCYDTQLNPSGNHPDAMISPSTSPMSSPHRHQRPQSSLLPSNPYPLPSCSLSSVVCSHARRGSDNEGRFPSSPNDMCHVADLRRTALLRSVQMRVQGPHSYDLSFGIRQGQDHAHEHEGEHDHEHEHLEDLEGTEGSSCNKSIVNEVTYNQRRDHDFGRSEHEIDYINNSTSDDCVSDLKFKQEDKSHSKFDIPMHKNS

SEQ ID NO: 1102 - protein, 257 aa, Vitis vinifera
  misc_feature: Public GI ID no. 157350149
  misc_feature (1)..(257): Bit score of 529.9 for hmm based on sequences of FIGURE 15.
  misc_feature: Functional Homolog Of SEQ ID NO. 892
MGSESNSPSPSSSSSPSGKRSRDPEDEVYLDNLHSHKRYLSEIMASSLNGLTVGDPLHENLMESPARSETMFYLRDDMSLQYSPMSEDSDDNRYCEIPINISSSQTDSLPTSPVSPHRYQRPFSALSSSGTTACPSHGCTLAAVACAQPRQRGSDSEGRFPSSPSDICHSADLRRAALLRSVQMRAQPPGPSVFELPFSAGQEAVRNMETEERPCLVDERDYRIEECSSMGISEHEFNREKSCRVLNMNLKGEEPGD

SEQ ID NO: 1103 - DNA, 1556 bp, Glycine max
  misc_feature: Ceres Clone ID no. 1611787
  misc_feature: Encodes the peptide sequence at SEQ ID NO. 1104
tctgaaaccagctctttctgatctctctccccctctctctaacaataaccctcgctgtcgctggttccaattcaccatgaccgtgatgatgcccgctcccattgatcagcaagaggacgaggacgtgctcgtgccggacgcggatttgcctgagaacaatcaccaacccatggaagttgtagctcaacctgaaaatgccaatactgtggagagtcagcccgttgaagatcctccgtcatctagatttacatggagaattgataacttttcaaggctgaatacaaagaagctctattcggaaatatttgttgttggtggctataaatggcgtgtgcttattttcccaaaaggaaacaatgtggactatttgtccatgtatttggatgttgctgattcagccagtttgccctatggttggagtagatatgcacagtttagcttggcagttgttaatcaaatgcataataagtattctgtgagaaaagacacacagcaccagtttaatgcacgtgaaagtgattggggtttcacatccttcatgcctcttggtgaattgtatgatcctagtagagggtatcttgtgcatgatactcttatagtcgaagctgaggttcttgttcgtaggattgttgattactggacttatgattcaaagaaggagactggctatgttgggcttaagaaccaaggagctacgtgttatatgaattctctactccaaaccttgtatcatattccttattttagaaaggctgtgtaccatatgccaacaactgagaatgatatgcccactggtagcatccctttggccttgcaaagtttattctacaagcttcaatacagtgacaccagtgttgcaacaaaggagctgacaaagtcttttggatgggatacatatgattctttcatgcagcatgatgttcaagaactaaatcgggttctttgtgaaaaacttgaagacaaaatgaagggaactgttgttgagggaaccatacaaaaattatttgaagggcaccatatgaattacatagaatgcatcaatgtagactacaaatcaactagaaaggagtcattttatgaccttcagcttgatgttaaaggttgtcgtgatgtttatgcttcctttgataagtatgtcgaagttgaaagtcttgagggggataacaaatatcatgctgaacagtatggtttgcaggatgctaagaaaggtgtcctatttattgattttcctcctgtccttcaactccagctaaaaagatttgaatatgattttatgcgggatactatggttaaggtacaaatttgatgatgagagggtgacaaaagaagataataaaagagcattagaggagcagtatggtggtgaggaagagttaccacagacaaatcccggattcaataacaccccatttaagttcaccaaatactcaaatgcttatatgctggtgtatatacgtgaaagtgacaaggacaaaatcatatgcaatgtggatgagaaagacattgcagcacatttaagggagaggttgaagaaagaacaagaagagaaagagcac

SEQ ID NO: 1104 - protein, 409 aa, Glycine max
  misc_feature: Ceres Clone ID no. 1611787
  misc_feature (1)..(409): Bit score of 946.0 for hmm based on sequences of FIGURE 10.
  misc_feature (61)..(181): Pfam Name: MATH Pfam Description: MATH domain
  misc_feature: Functional Homolog Of SEQ ID NO. 389
MTVMMPAPIDQQEDEDVLVPDADLPENNHQPMEVVAQPENANTVESQPVEDPPSSRFTWRIDNFSRLNTKKLYSEIFVVGGYKWRVLIFPKGNNVDYLSMYLDVADSASLPYGWSRYAQFSLAVVNQMHNKYSVRKDTQHQFNARESDWGFTSFMPLGELYDPSRGYLVHDTLIVEAEVLVRRIVDYWTYDSKKETGYVGLKNQGATCYMNSLLQTLYHIPYFRKAVYHMPTTENDMPTGSIPLALQSLFYKLQYSDTSVATKELTKSFGWDTYDSFMQHDVQELNRVLCEKLEDKMKGTVVEGTIQKLFEGHHMNYIECINVDYKSTRKESFYDLQLDVKGCRDVYASFDKYVEVESLEGDNKYHAEQYGLQDAKKGVLFIDFPPVLQLQLKRFEYDFMRDTMVKVQI

SEQ ID NO: 1105 - DNA, 426 bp, Sorghum bicolor
  misc_feature: Ceres Annot ID no. 8704649
  misc_feature: Encodes the peptide sequence at SEQ ID NO. 1106
atgccggttccccttgccccgtatccgactcctccggtgccattcacgccgcctaatggggcccaaagccagcttgtctgcaccgggtgccggaatctcctcatgtatccagctggtgcgacgtctgtctgctgtgccgtttgcagcaccgtcactgccgtgccggctccaggaactgagatggcacagttagtttgtggaggatgccacactctcctgatgtacatacgtggtgcgactagtgtacaatgttcttgctgccacaccgttaacctggctatggaagcaaatcaagttgcgcatgtaaactgcgggaactgccgtatgctgctcatgtaccagtatggagctaggtctgtgaaatgcgcagtctgcaattttgtgacatcagttggggtaagtattcatccatcaaactgcacttaa

SEQ ID NO: 1106 - protein, 141 aa, Sorghum bicolor
  misc_feature: Ceres Annot ID no. 8704649
  misc_feature (1)..(141): Bit score of 372.6 for hmm based on sequences of FIGURE 14.
  misc_feature (27)..(51): Pfam Name: zf-LSD1 Pfam Description: LSD1 zinc finger
  misc_feature: Functional Homolog Of SEQ ID NO. 239
MPVPLAPYPTPPVPFTPPNGAQSQLVCTGCRNLLMYPAGATSVCCAVCSTVTAVPAPGTEMAQLVCGGCHTLLMYIRGATSVQCSCCHTVNLAMEANQVAHVNCGNCRMLLMYQYGARSVKCAVCNFVTSVGVSIHPSNCT

SEQ ID NO: 1107 - DNA, 786 bp, Sorghum bicolor
  misc_feature: Ceres Annot ID no. 8633751
  misc_feature: Encodes the peptide sequence at SEQ ID NO. 1108
atggcatttcgtggcggcaaagaggcaaggccaaagagcgccatcgaatcgtctcgtctcgtcccctccctcccctcctcttcctcgcccaatcccagacaaatccaatccgaaatcatctcccccctcgcctcgcctcgccgaggaagagcagagagaagcgacgccgcgttccttcctcccgcgtcgagctcgatcttcccggagccaccgcgggaggcgcagacgttgggacagcctcgcgcgcgcgtcccacgtatgcagagccagatcgtgtgccatgcttgccggaccgttctactctacccgcgaggcgcgtccagcgtctgctgcgccgtttgccaggccatcaccaccgtgccgccaccaggactggagatggctcagcttatatgtggtggttgtcgaactttgctgatgtatactcgcagtgcagacaccgtaaggtgttcatgttgcaacacagtcaatcttgttagaccagtgaataatatagctcatgtgaactgcggccagtgccggacaactttgatgtatccgtatggcgcaccttcagtaaaatgtgccatatgcaattatgtcacgactaccggagtaaatactgtggcacccactccatctgcgaggccaacatcaaatgagtcttcatatattggctcatctacttctgctcctaaatctcaacctcagaatgtaactgttgttgttgagaaccctatgacagttgacgacaagggaaaacttgtcagcagcgttgtagttggagtcacagctgggaaagtgtga

SEQ ID NO: 1108 - protein, 261 aa, Sorghum bicolor
  misc_feature: Ceres Annot ID no. 8633751
  misc_feature (1)..(261): Bit score of 197.3 for hmm based on sequences of FIGURE 14.
  misc_feature (93)..(117): Pfam Name: zf-LSD1 Pfam Description: LSD1 zinc finger
  misc_feature: Functional Homolog Of SEQ ID NO. 239
MAFRGGKEARPKSAIESSRLVPSLPSSSSPNPRQIQSEIISPLASPRRGRAERSDAAFLPPASSSIFPEPPREAQTLGQPRARVPRMQSQIVCHACRTVLLYPRGASSVCCAVCQAITTVPPPGLEMAQLICGGCRTLLMYTRSADTVRCSCCNTVNLVRPVNNIAHVNCGQCRTTLMYPYGAPSVKCAICNYVTTTGVNTVAPTPSARPTSNESSYIGSSTSAPKSQPQNVTVVVENPMTVDDKGKLVSSVVVGVTAGKV

SEQ ID NO: 1109 - DNA, 3261 bp, Sorghum bicolor
  misc_feature: Ceres Annot ID no. 8668896
  misc_feature: Encodes the peptide sequence at SEQ ID NO. 1110
atggagattcagccacagcgggagcagccacagcaggaccacgatgaggagatgctggtcccgcatcaggatgccattgaggggccgcagcaggatgttgttgagggtccgcagccgatggaagaatctgcatccgctgttgagaaccaacttgtgccagatacctccacatccagatttacatggtgtattgaaaatttttctaggcgcaatgttagaaagcactactctgacgattttattgttgggggatacaaatggcgagtgcttgtcttccccaggggaaataatggtgaccacctttcaatgtatctggatgttgctgattcaaacttgctgcctcctggttggagtaggaatgcacaattcagccttgctgtggtaaaccaattagacagcaaagcatcattaagaaaagaagcgatacaccaattcaattcccgtgaaagtgattggggttttacatcttttatgcctttgttggatctgtatgattcaagtaaaggatatgttgtgaatgataaatgtatcatagaagctgaggttgctgtgcgtaaaacttttgatttctggaactatgactccaaaaggatgactggttatgttggcctgaagaatcaaggggctacctgttacatgaactctcttcttcagactttataccacattccctactttcgaaaggctgtatatcatatgcctactacagagaatgatacaccttcagggaacattccattggctttgcaaagtcttttttataaacttcagcattgtgataacagcgttgctacaaaagagctcaccaaatcttttggatgggatagctatgattcgttcatgcagcatgatgtccaagagttgaatagggtcctatgcgaaaagctggaaaacaagatgaagggaacccccgtggaaggagcaatacaaaaattgttcgagggtcaccatatgaattatatcgagtgcattaatgttgactcaaaatcgaccaggaaagagtcattctatgatctcgcacttgatgtcaaaggatgttctgatgtctatgcatcatttgataagtatgttgcacaggagaggttagaaggcgataataagtatcaatctgaggaacatggtctacaggatgccaagaaaggaatgctttttattgacttccctccagttttgcaacttcagttgaaacggtttgaatatgattttgtgcgggatacaatgctcaagataaatgaccgttatgagttcccacttcaattggatcttgatagagatgatggaaaatatctttctccagatgcggatagaagtgtgcgtaacctatatactcttcacagcgtgctggttcatagcggcggagttcatggaggacattactatgccttcattcgcccgaagctgtctgatcaatggtacaagtttgaggatgaacgagtgacgaaagaagacatgaagcgggcattggaggaacaatatggtggtgaagaagagcttcctcataccaatgggcttaaaaatgctcctatcagatttacgaagcattcaaatgcttacatgcttgtttacatccgagaaagtgacaaagagaaaatcatctgcgatttagatgatgaagatataccagaccaccttaaggttaggttaagaaaggaacaggaagagaaggaatgcaagaaaaaagagaaggctgaggctcatatgttcactgcattgaaggtggcccgagactctgatttcaaagagcaaattggaagacacatgcattttgatctcgtggactttgacaaagttaatagcttccgtgcacctaagaacatgtcaatcaacgatgtcaaggaggagctttcgaaagaatttggcatcccagtagaatcccaacgattttgggtgtgggcaaaacgacagaactttacctacagacccagtcggccattgaccttcctggaggaaacatctgctgagaatcaaggaattgcttctgggaagaccaaagaagatatattaattttcttcaagctctatgatcctgaaaaggaagacctaagatatgtaggaaatttttttgtgaaagcatcaggaaaaccatctgatatagtagaaaggctgaatgagatcgccggatttccgtctgatgaagatattgagctctatgaggaagtaaaatttgaaccagcggtgatgtgtgtaccaattgagagcaatatttcgttccgttcaagtcagattgacaatggtgatataatatgctaccaaaaacgctgtttgccagattcaatggatcgataccgatatccaagtgtcccttctttctttgaatatattcataatagacaggttgtctacttcagattgcttgataaaccaaaagaagaaggcttctctctggagctttcaaaacgctccacatatgatgatgttgttgagaaggttgctcggcaactacgtctggacgatccttctaaaatccggcttactcaacacaacctatcgtctcagcaacccaaacctcaccacatcaaatacaggagtcttaattatctttcagacatgctacataatcataatcagatgtgtaacattttatattatgacgtcctggatattccgttgcctgaactagaatctacgagatcactgaagatcacttttgaaaacgccacaaaccatgagatgtcgtttcacactatgcggttaccaaaaagtaacactcttcttgatttgattgaagacttaaagtcaaaggttgaactttcttgtaatgatgctgaatttcggttttttggagtccaccttcacaagatatgcaaggtgtatcaacctggagataagatagattcagttaacgaacccttgtatattgaagaggttcctgaggaagaaaaaaatgctgggcctcatgaccgtttggttcatgtctatcacttcgaagataatcgtcatgttcagtattttggagaacctttcttctttctaattcgtgatggtgaagctttgtcggatatcaaagtacggattcagaagagacttcaagttcctgatgagcagtttataaagtggaaatttgctcatgttacattcagtaggccagaatacctccaagattcagatattgtattgaaccgattccataaacagaaacctgtttatggagcttgggaacaacaccttggattggagcatacagccactaccccaagaaggtcgtactttggcagtcagaaccgccattcttttgagaggcctgtgaagatttacaactaa

SEQ ID NO: 1110 - protein, 1086 aa, Sorghum bicolor
  misc_feature: Ceres Annot ID no. 8668896
  misc_feature (1)..(1086): Bit score of 951.5 for hmm based on sequences of FIGURE 10.
  misc_feature (64)..(184): Pfam Name: MATH Pfam Description: MATH domain
  misc_feature: Functional Homolog Of SEQ ID NO. 389
MEIQPQREQPQQDHDEEMLVPHQDAIEGPQQDVVEGPQPMEESASAVENQLVPDTSTSRFTWCIENFSRRNVRKHYSDDFIVGGYKWRVLVFPRGNNGDHLSMYLDVADSNLLPPGWSRNAQFSLAVVNQLDSKASLRKEAIHQFNSRESDWGFTSFMPLLDLYDSSKGYVVNDKCIIEAEVAVRKTFDFWNYDSKRMTGYVGLKNQGATCYMNSLLQTLYHIPYFRKAVYHMPTTENDTPSGNIPLALQSLFYKLQHCDNSVATKELTKSFGWDSYDSFMQHDVQELNRVLCEKLENKMKGTPVEGAIQKLFEGHHMNYIECINVDSKSTRKESFYDLALDVKGCSDVYASFDKYVAQERLEGDNKYQSEEHGLQDAKKGMLFIDFPPVLQLQLKRFEYDFVRDTMLKINDRYEFPLQLDLDRDDGKYLSPDADRSVRNLYTLHSVLVHSGGVHGGHYYAFIRPKLSDQWYKFEDERVTKEDMKRALEEQYGGEEELPHTNGLKNAPIRFTKHSNAYMLVYIRESDKEKIICDLDDEDIPDHLKVRLRKEQEEKECKKKEKAEAHMFTALKVARDSDFKEQIGRHMHFDLVDFDKVNSFRAPKNMSINDVKEELSKEFGIPVESQRFWVWAKRQNFTYRPSRPLTFLEETSAENQGIASGKTKEDILIFFKLYDPEKEDLRYVGNFFVKASGKPSDIVERLNEIAGFPSDEDIELYEEVKFEPAVMCVPIESNISFRSSQIDNGDIICYQKRCLPDSMDRYRYPSVPSFFEYIHNRQVVYFRLLDKPKEEGFSLELSKRSTYDDVVEKVARQLRLDDPSKIRLTQHNLSSQQPKPHHIKYRSLNYLSDMLHNHNQMCNILYYDVLDIPLPELESTRSLKITFENATNHEMSFHTMRLPKSNTLLDLIEDLKSKVELSCNDAEFRFFGVHLHKICKVYQPGDKIDSVNEPLYIEEVPEEEKNAGPHDRLVHVYHFEDNRHVQYFGEPFFFLIRDGEALSDIKVRIQKRLQVPDEQFIKWKFAHVTFSRPEYLQDSDIVLNRFHKQKPVYGAWEQHLGLEHTATTPRRSYFGSQNRHSFERPVKIYN

SEQ ID NO: 1111 - protein, 278 aa, Vitis vinifera
  misc_feature: Public GI ID no. 157357468
  misc_feature (1)..(278): Bit score of 167.7 for hmm based on sequences of FIGURE 10.
  misc_feature (32)..(162): Pfam Name: MATH Pfam Description: MATH domain
  misc_feature: Functional Homolog Of SEQ ID NO. 389
MRFSKFFIYFLKLESISRTLRSIQPAHYLFRVESMSVLLDTSIEKYESGSFEVGGYKWRLCLYPNGNKKSDGDGHISLYLVISDTQNLPLGWEVTVSFKLFVFNHIHEEYLTVQDTDGKVRHFNVMKTQCGFAQFLPLDVLTDPCNGYLMDDSCIFGAEVFVIKYSGKGECLSMIKEPDDGTFTWMIENFSRLKQEAIYSEIFTVKDFKWHLVVYPKGNYKAKNKSLSLFLELANRGTLHHQRKLYTEFELLVKEQCNGGHVKPSHVKLNGTLHILFC

SEQ ID NO: 1112 - protein, 475 aa, Vitis vinifera
  misc_feature: Public GI ID no. 157337147
  misc_feature (1)..(475): Bit score of 1147.2 for hmm based on sequences of FIGURE 5.
  misc_feature (67)..(156): Pfam Name: PIGA Pfam Description: PIGA (GPI anchor biosynthesis)
  misc_feature (208)..(384): Pfam Name: Glycos_transf_1 Pfam Description: Glycosyl transferases group 1
  misc_feature: Functional Homolog Of SEQ ID NO. 138
MVSFHLKQNFISIAVVETPGVMGDQKRHKILMVSDFFYPNFGGVENHIYYLSQCLLKLGHKVVVLTHAYGNRSGVRYMTGGLKVYYIPWKPFLMQNTLPTFYGTLPIMRTILIREKISLVHGHQAFSTLCHEALMHARTMGYKVVFTDHSLYGFADVGSIHMNKVLQFTLADVSQAICVSHTSKENTVLRSGLPPEKVFVIPNAVDTAMFTPAPEKLSHNEIVIIVISRLVYRKGADLLVEVIPEICRLFSNVRFIVGGDGPKRVRLEEMREKNSLQDRVEMLGAVPHARVRSVLISGHIFLNSSLTEAFCIAILEAASCGLLTVSTRVGGVPEACIFRYFVLPDDMIVLAEPDPSDMVRAITKAISILPKIDPQVMHLRMKKLYNWHDVAKRTEIVYDRALGCSNQNLVDRLSRYLPCGGWAGKLFCLVMIIDFLLWRLLQLWQPPEEIEEVPDFSLPNSECPEFKEDGSLSLR

SEQ ID NO: 1113 - DNA, 1000 bp, Panicum virgatum
  misc_feature: Ceres Clone ID no. 1781991
  misc_feature: Encodes the peptide sequence at SEQ ID NO. 1114
agccgcaccgcaagaagcgtcctcggggggcacgtccttgatcggtggcgcctgcctctcgccgccgctgctggtgcctctcccccaccacgccgcagatttttttttcttattttttcctcccgtcggttctcggaggtttctcgccgtctcctccccacgcggttcctgaggcatgcggagccagatcgtctgccacgggtgcaggagccttttactctacccgagaggtgctcccagcgtgtgctgcgcggtatgccacgcagtcaccaccgtgccacctccaggaatggagatggctcgacttatttgtggtggctgccaaacattattgatgtatactcgcaatgcaacaactgtaagatgctcatgttgtgacacagttaatcttgtcagaccagtgagtagcatagctcatgtgaactgtggccagtgccaaacagtgttgatgtatccatacggagcaccatctgtcaaatgtgctatctgcaactttattacaaacgttggtgggcatcaggtaccaaccgtgagacctttgccacctgcgctgcctgcatcaagtggaaattcatataacatcccgtcaacttctgcgccaacgagtcaatcacagaacataactgttgttgttgaaaatccaatgacagtagatgacaagggaaaattggtgagcaatgttgtagttggggttacaactggtgggaaaaagtaacatatcagaacccaatgtaactttgttaatgcttaatatctggagaagttgaaaataccttgtattatactgctgttcggtgattggttggtcgacaaaaggacccctgaagagcatcggggcaaagctcgcctttgcccctgcgatcatgccagaacgaatgaaaacgaagtgcgggtgtggatactcagaaactgtagcttgttacccttgattcttttgtatgtaatatgggctctgttagacttcactgtgtgatcaaactcctctcccgtgggtgcttgc

SEQ ID NO: 1114 - protein, 179 aa, Panicum virgatum
  misc_feature: Ceres Clone ID no. 1781991
  misc_feature (1)..(179): Bit score of 179.2 for hmm based on sequences of FIGURE 14.
  misc_feature (7)..(31): Pfam Name: zf-LSD1 Pfam Description: LSD1 zinc finger
  misc_feature: Functional Homolog Of SEQ ID NO. 239
MRSQIVCHGCRSLLLYPRGAPSVCCAVCHAVTTVPPPGMEMARLICGGCQTLLMYTRNATTVRCSCCDTVNLVRPVSSIAHVNCGQCQTVLMYPYGAPSVKCAICNFITNVGGHQVPTVRPLPPALPASSGNSYNIPSTSAPTSQSQNITVVVENPMTVDDKGKLVSNVVVGVTTGGKK

SEQ ID NO: 1115 - protein, 1098 aa, Physcomitrella patens subsp. patens
  misc_feature: Public GI ID no. 168032240
  misc_feature (1)..(1098): Bit score of 879.3 for hmm based on sequences of FIGURE 10.
  misc_feature (41)..(161): Pfam Name: MATH Pfam Description: MATH domain
  misc_feature: Functional Homolog Of SEQ ID NO. 389
MVVPPQDLNDGIEPMEGHGESVATVENQPVDDHIGKFTWTLTNFGKLSVRKHYSDPFVVGGYKWRVLLFPRGNNVDQLSIYLDVADSNQLPSGWTRFAHFNLAVLNQYEPKMSVRKDTQHQFNARESDWGFTSFMPLHELYDLSKGFLVNDTLVIEADVNAPKMVDYWSHDSKKETGFVGLKNQGATCYMNSLLQTLYHIPYFRKAVYHMPTTENDAPSSSIPLALQSLFYKMQYSDTCVATKDLTKSFGWDTYESFMQHDVQELNRVLCEKLENKMKGTAVEGTIQNLFEGHHMNYIECINVDFKSTRKESYYDLQLDVKGCKNIYDSFDKYVEIEKMEGENKYQADQFGLQDAKKGVLFIDFPPVLQLQLKRFEYDYMRDSMVKVNDRYEFPLQLDLDKYDGKYLSPDADRSVRNLYSLHSVLVHSGGVQGGHYYAFIRPTLTNQWYKFDDEHVTKEETKRALEDQYGGEEELPAQNPAYNQPAFKFTKYSNAYMLVYIRDSDKDKVICNVDEKDIAEHLQIRLKKEQGEKERKRKDKAEAHLYTVLKVIARDEDLSNQIGKQQFFDLVDHDSVKSYRINQEVPFKQFKEDVAKEIGIPASCQRYWLWARRQNHTYRPNKPLTEQEEMETVGKLKDASNKTHNAELRLWLEVNYQEGIPAPVPERTKEDVLLFFKLYSPEREELRFVGRLFVKANGRPVDILEKLNQMAGFAANEEIRLYEEIKFDPTVMCEHIDKKSTFRGSQLENGDIICYQKARTKEEEAKFNYPDVPSFLEYVCNRQIVHFRRLEKPKEDEFCLELSKQHTYDDVVEKVAKKLGLEDPSKLRLTSHNCYSQQPKPQPIKYRGVERLSDMLGHYNQISDILYFETLDLPLPELQGLKTLKITFHNSKTEEVSTHNVRLPKQSTVGDVINELKTKVELSSPKAELRILEVFYHKIYKVFPLNEKIENINDQYWKLRAEEIPDEEKELGPQERVIHVYHFLRDAAQNQMQVENFGEPFFLKVKESETLASIKARIQNKLQIPDDEFSKYKFAFLSLGRPDYLRDDDVVASRFQKKDSYGAWEYYLGLEHIDSAPKRAHQTNQGRHSFEKPVKIYN

SEQ ID NO: 1116 - protein, 331 aa, Vitis vinifera
  misc_feature: Public GI ID no. 157357464
  misc_feature (1)..(331): Bit score of 266.4 for hmm based on sequences of FIGURE 10.
  misc_feature (42)..(172): Pfam Name: MATH Pfam Description: MATH domain
  misc_feature: Functional Homolog Of SEQ ID NO. 389
MADEKPPVVAEKTLHPTSICNSTTSISRTLRSIKPAHYLFRVESVSVLLNTDIEKYESGSFKVGGYRWRLCLYPNGNKKSGGEDHISLYLEISDAQKLPVGWEVTVNFKLFVFNHIHEKYLTVQDADGKVRDFNVMKSRCGFAQFLSLDVLKDPCNGYLMDDSCIFGAEVFVIKYSGKGECLSMIKDPDDGTFTWVIENFSTLNEEVLYSETFTIKEIKWHLSLYPKGNGKVKNKSLCLFLELADCETLHHQRKLYMEFELLIKDQCNDENVEPSHVKSNAKVWFCDSNKEWGFADMVSLSDLNDKSKDFLLNDSLIVEAKILLMMHSKNI

SEQ ID NO: 1117 - protein, 142 aa, Bambusa oldhamii
  misc_feature: Public GI ID no. 158516901
  misc_feature (1)..(142): Bit score of 366.7 for hmm based on sequences of FIGURE 14.
  misc_feature (26)..(50): Pfam Name: zf-LSD1 Pfam Description: LSD1 zinc finger
  misc_feature: Functional Homolog Of SEQ ID NO. 239
MPVPLAPHPTPVPFTPPNGAQSQLICSGCRNLLMYSAGATSVCCAVCSTMTAVPAPGTEMAQLVCGGCHTLLMYIRGATSVQCSCCHTVNLAMEANQVAHVNCGNCRILLMYQYGARSVKCAVCNFVTSVGAPPGADQKPSN

SEQ ID NO: 1118 - protein, 146 aa, Hordeum vulgare subsp. vulgare
  misc_feature: Public GI ID no. 170780160
  misc_feature (1)..(146): Bit score of 395.0 for hmm based on sequences of FIGURE 14.
  misc_feature (30)..(54): Pfam Name: zf-LSD1 Pfam Description: LSD1 zinc finger
  misc_feature: Functional Homolog Of SEQ ID NO. 239
MPVPLAPYPTPPAPFTPPAPNAGAQSQLVCSGCRNLLMYPAGATSVCCAVCSTVTAVPAPGTEMAQLVCGGCHTLLMYIRGATSVQCSCCHTVNLAMEANQVAHVNCGSCRMLLMYQYGARSVKCAVCSFVTSVGASSGAEQKPSN

SEQ ID NO: 1119 - DNA, 624 bp, Miscanthus x giganteus
  misc_feature: Ceres Clone ID no. 2055374
  misc_feature: Encodes the peptide sequence at SEQ ID NO. 1120
agagagagagggagggagggagacaggagagaggaagacagagagagatgcggtaacccaagaactgctcttgtgcatgaagcagccataagcattgctattagggtttcatgcagggcaaagcagctggtttctgccgcctgaacgccgccggaatctgcgaggccttcccgagcagcgtcatcgaataaggcagccggcacggcaatgccggttccccttgccccgtatccgactcctccggtgccattcacgccgcccaatggggggcaaagccagcttgtctgcaccggatgccggaatctcctcatgtatccagctggtgcgacgtcggtctgctgtgcagtttgcagcaccgtcacctccgtgccggctccaggaactgagatggcacagttagtttgcggaggatgccacactctcctgatgtacatacgtggtgctactagtgtacaatgttcttgctgccacactgttaacctggctatggaagcaaatcaagttgcgcatgtaaactgcgggaactgccgtatgctgctcatgtaccagtatggtgctaagtccgtgaaatgcgcagtctgcaattttgtgacatcagttggggcttcacctggtgcagagcag

SEQ ID NO: 1120 - protein, 139 aa, Miscanthus x giganteus
  misc_feature: Ceres Clone ID no. 2055374
  misc_feature (1)..(139): Bit score of 370.1 for hmm based on sequences of FIGURE 14.
  misc_feature (27)..(51): Pfam Name: zf-LSD1 Pfam Description: LSD1 zinc finger
  misc_feature: Functional Homolog Of SEQ ID NO. 239
MPVPLAPYPTPPVPFTPPNGGQSQLVCTGCRNLLMYPAGATSVCCAVCSTVTSVPAPGTEMAQLVCGGCHTLLMYIRGATSVQCSCCHTVNLAMEANQVAHVNCGNCRMLLMYQYGAKSVKCAVCNFVTSVGASPGAEQ

SEQ ID NO: 1121 - DNA, 1227 bp, Solanum lycopersicum
  misc_feature: Ceres Annot ID no. 8461848
  misc_feature: Encodes the peptide sequence at SEQ ID NO. 1122
atggctttcctcttccacaaatttcaagagggagtgaaaattcttgctaaaagccccacttttgctagagaatcgaggcttcttcagttcgaagctgacataaatctactattcctttacaccagccttacccttataccttgtgaaggtgaagggaatgttcccgatagaccctctgtcaattacaaccgtttaggaaggaatgccgaagaagctgatgcagaggagattattgatatggctaacaaagcctcattagacgatcaacagaagcaagttcatgagaatgtgcattctcaggttacaaacttttgcagctatatggatgacatattactcctggatcaaaaggtcaaagacaatcaggccacatcaccagcaacactacatttttctcctcgtagtagtggccttggtcttgctgttgatgggaattctctagcacaagaccgcattgccgtacctgaaaccaagacactgcaccgcacagaagtttcacagaggttaaaagatcttatgggctacactctcgaggtcaaaccatctcaaattcctcatgaggatgctggaaagggtttattcttacaaggtgaagccaatattggttctgtcatagcattctatcctggagtagtctaccctccagcatattaccgctatattcctgggtaccctagagttgatgcccaaaatccacatctgatcacacggtatgatgggactatgatcaatgctcagccctggggtgctggtggtgaatgtcgtgaattatgggattggaccagttctcctgaacctaagtgcactatgcaagctggtgaaaaaggttctgacctagatggaacagacgttggaggcaaccttgaagtgtttgagaggagaaaccctctagcctttgctcatttcgccaaccacccagccaaaggcatggtccccaatgtaatggtatacccttatgatttccccctgcttgaggaggacatgagaccctatatacctaatgtttcatttggaaacgatgaagaaacagagactagtaaatttggcagctttaggttcatcaaaatgtggaagtccaacaacaatgaatcaaaagtccccgttctgaagacacttcttcttgtggctactagggcaatttgtgatgaagaggttatgttgaactacagactgagcaattcagagcacataccgtcatggtatactccagtagatgaagaggactaa

SEQ ID NO: 1122 - protein, 408 aa, Solanum lycopersicum
  misc_feature: Ceres Annot ID no. 8461848
  misc_feature (1)..(408): Bit score of 679.8 for hmm based on sequences of FIGURE 8.
  misc_feature: Functional Homolog Of SEQ ID NO. 172
MAFLFHKFQEGVKILAKSPTFARESRLLQFEADINLLFLYTSLTLIPCEGEGNVPDRPSVNYNRLGRNAEEADAEEIIDMANKASLDDQQKQVHENVHSQVTNFCSYMDDILLLDQKVKDNQATSPATLHFSPRSSGLGLAVDGNSLAQDRIAVPETKTLHRTEVSQRLKDLMGYTLEVKPSQIPHEDAGKGLFLQGEANIGSVIAFYPGVVYPPAYYRYIPGYPRVDAQNPHLITRYDGTMINAQPWGAGGECRELWDWTSSPEPKCTMQAGEKGSDLDGTDVGGNLEVFERRNPLAFAHFANHPAKGMVPNVMVYPYDFPLLEEDMRPYIPNVSFGNDEETETSKFGSFRFIKMWKSNNNESKVPVLKTLLLVATRAICDEEVMLNYRLSNSEHIPSWYTPVDEED

SEQ ID NO: 1123 - protein, 403 aa, Zea mays
  misc_feature: Public GI ID no. 212723622
  misc_feature (1)..(403): Bit score of 973.9 for hmm based on sequences of FIGURE 8.
  misc_feature: Functional Homolog Of SEQ ID NO. 172
MAFLFNKFQEAIRTIAKSPMFARDPRHLQFEADVNRLFLYTSYYRLGENADEKDAEEIIDLASKASIADQQKQVQDNVHYELTHMCQAMDSILCPDTINDPSKGPSEAHNHSQRSGLSFAVGGAASANKQSAIIPATRPLTRAELSKKFRDHFGYTLDIGPSGIPHKDAGQGLFLSGQANAGAVLAIYPGVIYSPAYYRYIPGYPRIDVCNNYLITRYDGTIIDAKPWCFGGETRALWDGSDLVDYNAMAPKGSENNSDRVWRMLSKPLEKGVRENFGEVLERRNPLAFGHFANHPPKGSSPNVMICPYDFPLTEKDMRVYIPNITFGGQETIRMKRFGSFYFKSGGSDNQAGDSLVLKTLVLVSTRSICDEELFLNYRYSNSKRRPEWYSPVDEEEDKRRWS

SEQ ID NO: 1124 - protein, 1123 aa, Physcomitrella patens subsp. patens
  misc_feature: Public GI ID no. 168035595
  misc_feature (1)..(1123): Bit score of 1002.3 for hmm based on sequences of FIGURE 10.
  misc_feature (57)..(177): Pfam Name: MATH Pfam Description: MATH domain
  misc_feature: Functional Homolog Of SEQ ID NO. 389
MTVIAAPPEEDDDMLVPPQDFNDVIEPMEVVGQGEGVATVENQHVDDPQTGKFTWNIENFSKLSLRKHYSETFTVGGYKWRVLLFPKGNNVDHLSVYLDVADSAQLPYGWSRFAHFTLAVVNPYDPKLTVKKDTQHHFNVRESDWGFTSFMPLPDLYDPSRGFLMNDTLIVEADVNVRKVVDYWAYDSKKETGYVGLKNQGATCYMNSLLQTLYHLPYFRKAVYHMPTTENDVPSNSIPLALQSLFYKIQYSDTSIATKDLTKSFGWDTYDSFMQHDVQELNRVLCEKLEDKMKGTAVEGTIQQLFEGHHMNYIECINVDYKSTRKESFYDLQLDVKGCKDVYESFDKYVEVERLEGENKYHAEQFGLQDAKKGVLFIDFPPVLQLQLKRFEYDFMRDTMVKINDRYEFPLQLDLDRENGKYLSPDADRSVRNLYTLHSVLVHSGGVHGGHYYAFIRPTLSDQWFKFDDERVTKEEPKRALEEQYGGEEELPQTNPGFNNTPFKFTKYSNAYMLVYIREADKDKIVCNVDEKDIAEHLQVRLKKEQEEKERKRKEKAEAHLYTIIKASLHLIFLHLVGRDEDLQNQIGKDIHFDLVDHEKVRSFRIQKQTLFTQFKASKELGVPVECQRFWLWAKRQNHTYRPNRPLTEQEEAQTVGHLKEASNKAHNAELKLFLEVQRTPGAESVPMPPPIKTKEDVLLFFKLYDPLKEELRYVGRSYVKASGRPADILERLNEMAGFPPNEEIQLYEEIKFEPNVMCEHIEKKSTFKASQLEDGDIICYQRALTREQELASRYPDVPSFLEYVRNRQIVHFRRLDKPKDDEFCLELSKQHTYDDVVEKVAEEIKLEDASKIRLTSHNCYSQQPKPQPIKYRGVERLSDMLVHYNQTSDILYFETLDLPLPELQGLKTLKVAFHNAKTEEVSVHNIRLPKQSTVGDVVNELKGKVELSSPKAELRILEVFYHKIYKIFPLSEKIENINDQYWTLRAEEVPDEEKELGPQDRLIHVYHFTRDASQNYMVQNFGEPFFLVVRENETLTEVKQRIQKKLVISDEEFSKWKFAFLSLGRPEYLQDGDVVAARFQKRDTYGAWEHYLGLEHADCAPKRSHTTNQNRHNFEKPVKIYN

SEQ ID NO: 1125 - protein, 1115 aa, Physcomitrella patens subsp. patens
  misc_feature: Public GI ID no. 168015828
  misc_feature (1)..(1115): Bit score of 1005.3 for hmm based on sequences of FIGURE 10.
  misc_feature (57)..(177): Pfam Name: MATH Pfam Description: MATH domain
  misc_feature: Functional Homolog Of SEQ ID NO. 389
MTVIAAPPEEDDDMLVPPQDFNDVIEPMEVVGQGEGVVTVENQLVDDPQTGKFTWPIENLSKINLRKHYSETFTVGGYKWRVLLFPKGNNVDHLSIYLDVADSAQLPYGWSRFAHFTLAVVNQIDPKLTVKKDTQHQFNVRESDWGFTSFMPLHDLNDPSRGFVVNDTLIVEADVNVRKVVDYWAYDSKKETGFVGLKNQGATCYMNSLLQTLYHLPYFRKAVYHMPTTENDVPSNSIPLALQSLFYKIQYSDTSVATKDLTKSFGWDTYDSFMQHDVQELNRVLCEKLEDKMKGTAVEGTIQQLFEGHHMNYIECINVDYKSTRKESFYDLQLDVKGCKDVYESFDKYVEVERLEGENKYHAEQFGLQDAKKGVLFIDFPPVLQLQLKRFEYDFMRDTMVKINDRYEFPLQLDLDRENGKYLSPDADRSVRNLYTLHSVLVHSGGVHGGHYYAFIRPTLSDQWFKFDDERVTKEELKRALEEQYGGDEELPQTNPCFNNTPFKFTKYSNAYMLVYIREADKDKVVCNVDEKDIAEHLQIRLKKEQEEKERKRKEKAEAHLYTIIKVGRDEDLQNQIGKDIHFDLVDHEKVRSFRIQKQTPFTQFKEEIAKQLGVPVECQRFWLWAKRQNHTYRPNRPLTDQEEAQTVGHLKEASNKAHNAELKLFLEVQRLPGADSVPIPPPIKTKEDVLLFFKLYNPEKEELRYVGRSYVKASGRPADILERLNEMAGFPPNEEIQLYEEIKFEPNVMCEHIDKKSTFRASQLEDGDIICYQRALTRGEEDVCRYPDVPSFLEYVRNRQNVHFRRLEKPKDDEFCLELSKQHTYDDVVERVAEKIGLEDASKIRLTSHNCYSQQPKPQPIKYRGVERLSDMLVHYNQTSDILYFETLDLPLPELQGLKTLKVAFHNAKTEELSVHNIRLPKQSTVGDVVNELKGKVELSSPRAELRILEVFYHKIYKIFPLNEKIENINDQYWTLRAEEVPDEEKELGPQDRLIHVYHFTRDASQNHMVQNFGEPFFLVVRESETLVEVKGRIQKKLLISDEEFSKWKFAFLSLGRPEYLQDGDVVAARFQKRDTYGAWEHYLGLEHTDSAPKRSHTTNQNRHNFEKPVKIYN

SEQ ID NO: 1126 - DNA, 679 bp, Zea mays
  misc_feature: Ceres Clone ID no. 328046
  misc_feature: Encodes the peptide sequence at SEQ ID NO. 1127
attagtagattccacaacgtacatcttagatagtttaattttgataatgggtccaatatatatcaccctatgcatcttcctagtacttgtcttacatggagatacaactttggcagaaacttgcaggcagtttgttaaatgggatccattctgctttagtgcaatgtgcaaggtggtggacttccggatcgtacttagtaccattccaaatttccggtgaaggcaagtaaatacagtggtggttgctaccgtttggtttgcatcctattccctgtcattgagtacttgatacctgttgggaatgaggggagtagcagcacgtccactttcactctcacaataacgctgcccagacgcaaccatgatttaattagaaacttattgtccaaggaagtttgtttttttatatagtcgtgcgcactggttaattcagttcaggtcgtatgtttatcttcccttgctagccgattaataatacttagtatgttattgtcatgatatatgtttatacactattgccccctcatttatgtaatcttgtaaggggatgttgctgaaattttatatatggacgtcggaagtgtagttcagtagcattccgggttgtttgtggaacccggggtgttacaaatttaactgaacacttcaaaatatcaaataataagtaaaagacgggatc

SEQ ID NO: 1127 - protein, 57 aa, Zea mays
  misc_feature: Ceres Clone ID no. 328046
  misc_feature (1)..(57): Bit score of 66.9 for hmm based on sequences of FIGURE 1.
  misc_feature: Functional Homolog Of SEQ ID NO. 2
MGPIYITLCIFLVLVLHGDTTLAETCRQFVKWDPFCFSAMCKVVDFRIVLSTIPNFR

SEQ ID NO: 1128 - protein, 135 aa, Chlamydomonas reinhardtii
  misc_feature: Public GI ID no. 159467152
  misc_feature (1)..(135): Bit score of 272.6 for hmm based on sequences of FIGURE 4.
  misc_feature (52)..(135): Pfam Name: Ribosomal_L27e Pfam Description: Ribosomal L27e protein family
  misc_feature (7)..(40): Pfam Name: KOW Pfam Description: KOW motif
  misc_feature: Functional Homolog Of SEQ ID NO. 32
MVKFLKPGKVVILLSGRYAGKKAVIVANKDDGSSVRPYGHATVVGLAKEPRKVIKKISQKKQARRSSIKTFVKTVNYQHIMPTRYTLDVDLKAVVAPEAIESAAKKTDARKECKKLLEEKFKSGKNRWFFSKLRF

SEQ ID NO: 1129 - protein, 135 aa, Picea sitchensis
  misc_feature: Public GI ID no. 116783106
  misc_feature (1)..(135): Bit score of 308.2 for hmm based on sequences of FIGURE 4.
  misc_feature (52)..(135): Pfam Name: Ribosomal_L27e Pfam Description: Ribosomal L27e protein family
  misc_feature (7)..(40): Pfam Name: KOW Pfam Description: KOW motif
  misc_feature: Functional Homolog Of SEQ ID NO. 32
MVKFLKQNKVVVLLQGRFAGRKAVIIKTFDDGTAGRAYGHCLVAGIAKYPKKVIRKDSAKKTAKKSRLKAFIKVVNYNHIMPTRYSLDVDLKNVVSFDKLETRDKKVAALKGVKASFEERFKAGKNRWFFTKLRF

SEQ ID NO: 1130 - protein, 135 aa, Populus balsamifera subsp. trichocarpa
  misc_feature: Public GI ID no. 118483156
  misc_feature (1)..(135): Bit score of 329.9 for hmm based on sequences of FIGURE 4.
  misc_feature (52)..(135): Pfam Name: Ribosomal_L27e Pfam Description: Ribosomal L27e protein family
  misc_feature (7)..(40): Pfam Name: KOW Pfam Description: KOW motif
  misc_feature: Functional Homolog Of SEQ ID NO. 32
MVKFLKTNKAVIILQGKYAGRKGVIVRSFDDGTRDRPYGHCLVAGIKKYPSKVIKKDSAKKTAKKSRVKCFIKLVNYQHLMPTRYTLDVDLKDVVTADYLSTKDKKITACKETKARFEERFKTGKNRWFFTKLRF

SEQ ID NO: 1131 - protein, 135 aa, Populus balsamifera subsp. trichocarpa
  misc_feature: Public GI ID no. 118483485
  misc_feature (1)..(135): Bit score of 325.8 for hmm based on sequences of FIGURE 4.
  misc_feature (52)..(135): Pfam Name: Ribosomal_L27e Pfam Description: Ribosomal L27e protein family
  misc_feature (7)..(40): Pfam Name: KOW Pfam Description: KOW motif
  misc_feature: Functional Homolog Of SEQ ID NO. 32
MVKFLRPNKAVIVLQGRYAGRKAVIVKHFDDGTRDRPYGHCLVAGIKKYPSKVIKKDSAKKTAKKSRVKCFVKVVNYQHLMPTRYTLDVDLKDLVTPDCLATKDKKVVACKETKTRFGERFKTGKNRWFFTKLRF

SEQ ID NO: 1132 - DNA, 661 bp, Arabidopsis thaliana
  misc_feature: Ceres Clone ID no. 42277
  misc_feature: Encodes the peptide sequence at SEQ ID NO. 1133
aacttagggttcatagcagccagagaaagagagacaagtgagagggatctaccaaacgaagcaacaatggtgaagttcytgaagcagaacaaggccgtgatccttcttcaaggacgttacgccggaaagaaagccgtcatcatcaaatccttcgacgacggtaaccgtgatcgtccttacggacactgcctcgtcgccggactgaagaagtacccgagcaaagtcatccgcaaagactcagctaagaagacagctaagaaatctagggttaagtgtttcatcaagcttgttaattaccagcatctgatgcctactcgttacacactcgacgtggatctcaaggaagtggcgactcttgatgctcttcagagtaaggataagaaggttgctgctcttaaggaagctaaggctaagcttgaggagaggttcaagactggtaagaacagatggttctttaccaagctcaggttctgaagaaattttctatttcgtgaggaattcattttgagcttttttttatcgtgttttttagtttctagggttcatttcccatggtgaaaaatgtggatcctgttttggattgtggaagatgttttgttgaagtttggattatggatttgatcttttattttgattctctaatgcattcttatttactctc

SEQ ID NO: 1133 - protein, 135 aa, Arabidopsis thaliana
  misc_feature: Ceres Clone ID no. 42277
  misc_feature (1)..(135): Bit score of 328.5 for hmm based on sequences of FIGURE 4.
  misc_feature (52)..(135): Pfam Name: Ribosomal_L27e Pfam Description: Ribosomal L27e protein family
  misc_feature (7)..(40): Pfam Name: KOW Pfam Description: KOW motif
  misc_feature: Functional Homolog Of SEQ ID NO. 32
  misc_feature (5)..(5): Xaa is any aa, unknown, or other
MVKFXKQNKAVILLQGRYAGKKAVIIKSFDDGNRDRPYGHCLVAGLKKYPSKVIRKDSAKKTAKKSRVKCFIKLVNYQHLMPTRYTLDVDLKEVATLDALQSKDKKVAALKEAKAKLEERFKTGKNRWFFTKLRF

SEQ ID NO: 1134 - DNA, 523 bp, Arabidopsis thaliana
  misc_feature: Ceres Clone ID no. 93699
  misc_feature: Encodes the peptide sequence at SEQ ID NO. 1135
acttagggttcatagcagccagagagagagagacaagtgagagggatctaccaaacgaagcaacaatggtgaagttcttgaagcagaacaaggccgtgatccttcttcaaggacgttacgccggaaagaaagccgtcatcatcaaatccttcgacgacggtaaccgtgatcgtccttacggacactgcctcgtcgccggactgaagaagtacccgagcaaagtcatccgcaaagactcagctaagaagacagctaagaaatctagggttaagtgtttcatcaagcttgttaattaccagcatctgatgcctactcgttacacactcgacgtggatctcaaggaagtggcgactcttgatgctcttcagagtaaggataagaaggttgctgctcttaaggaagctaaggctaagcttgaggagaggttcaagactggtaagaacagatggttctttaccagctcaggttctgaagaaattttctatttcgtgaggaattcgcacgagaccagtacgtgaactat

SEQ ID NO: 1135 - protein, 150 aa, Arabidopsis thaliana
  misc_feature: Ceres Clone ID no. 93699
  misc_feature (1)..(150): Bit score of 316.0 for hmm based on sequences of FIGURE 4.
  misc_feature (52)..(131): Pfam Name: Ribosomal_L27e Pfam Description: Ribosomal L27e protein family
  misc_feature (7)..(40): Pfam Name: KOW Pfam Description: KOW motif
  misc_feature: Functional Homolog Of SEQ ID NO. 32
MVKFLKQNKAVILLQGRYAGKKAVIIKSFDDGNRDRPYGHCLVAGLKKYPSKVIRKDSAKKTAKKSRVKCFIKLVNYQHLMPTRYTLDVDLKEVATLDALQSKDKKVAALKEAKAKLEERFKTGKNRWFFTSSGSEEIFYFVRNSHETST

SEQ ID NO: 1136 - DNA, 591 bp, Brassica napus
  misc_feature: Ceres Clone ID no. 1417093
  misc_feature: Encodes the peptide sequence at SEQ ID NO. 1137
acctagagtttctagcggcgataggagagagagagagagagagagatctagacaagtgaagcaaaatggtgaagttcttgaagcagaacaaggccgtgatcctccttcaaggccgatacgccggtaagaaggccgtcatcatccgctccttcgacgacggaaaccgtgagcgtccttacggccactgcctcgtcgccggactcaaaaagtacccgagcaaggtcatccgcaaggactcggccaagaagactgcaaagaaatctagggtcaagtgtttcatcaaggtagttaactaccagcatctgatgcctacgcgttacaccctcgacgtggatctcaaggaagtggcgaccctcgaggccctttcttcaaaggacaagaaggtggcggctctcaaggaggctaagggtaagctcgaggagaggttcaagaccgggaagaacaggtggttcttcaccaagctcaggttctgaagacgttttgatctttttttttttacttgttgttgcttttcgcattgaatttttcagcgtcattttagtttctactgttgaacaatgttggtcttgttttggaagatgaatgatcttt

SEQ ID NO: 1137 - protein, 135 aa, Brassica napus
  misc_feature: Ceres Clone ID no. 1417093
  misc_feature (1)..(135): Bit score of 327.9 for hmm based on sequences of FIGURE 4.
  misc_feature (52)..(135): Pfam Name: Ribosomal_L27e Pfam Description: Ribosomal L27e protein family
  misc_feature: Functional Homolog Of SEQ ID NO. 32
MVKFLKQNKAVILLQGRYAGKKAVIIRSFDDGNRERPYGHCLVAGLKKYPSKVIRKDSAKKTAKKSRVKCFIKVVNYQHLMPTRYTLDVDLKEVATLEALSSKDKKVAALKEAKGKLEERFKTGKNRWFFTKLRF

SEQ ID NO: 1138 - DNA, 457 bp, Brassica napus
  misc_feature: Ceres Clone ID no. 960737
  misc_feature: Encodes the peptide sequence at SEQ ID NO. 1139
aaaagtagagacgaagccatggttaagtttctgaagcagaacaaagctgtgatcctccttcaaggtcgttatgccggcaagaaggctgtgatcatccgttccttcgacgacggcaaccgcgagcgtccttacggacactgcctcgtcgccgggctcaagaagtaccccagcaaggtcatccgcaaggactcagccaagaagacggcgaagaagtcgagggtcaagtgtttcatcaaggtcgttaactaccagcatctgatgcctactcgttacacgttggacgtggatctgaaggaggttgcgactctcgaggctctggcttcgaaggacaagaaggtggcggctcttaaggaggctaaggctaagctcgaggagaggttcaagtctggaaagaacaggtggttcttcaccaagctaaggttctgagaaccgagtttctttttatcttttgtaatgg

SEQ ID NO: 1139 - protein, 135 aa, Brassica napus
  misc_feature: Ceres Clone ID no. 960737
  misc_feature (1)..(135): Bit score of 326.3 for hmm based on sequences of FIGURE 4.
  misc_feature (52)..(135): Pfam Name: Ribosomal_L27e Pfam Description: Ribosomal L27e protein family
  misc_feature (7)..(40): Pfam Name: KOW Pfam Description: KOW motif
  misc_feature: Functional Homolog Of SEQ ID NO. 32
MVKFLKQNKAVILLQGRYAGKKAVIIRSFDDGNRERPYGHCLVAGLKKYPSKVIRKDSAKKTAKKSRVKCFIKVVNYQHLMPTRYTLDVDLKEVATLEALASKDKKVAALKEAKAKLEERFKSGKNRWFFTKLRF

SEQ ID NO: 1140 - DNA, 483 bp, Brassica napus
  misc_feature: Ceres Clone ID no. 1033945
  misc_feature: Encodes the peptide sequence at SEQ ID NO. 1141
  misc_feature (92)..(92): n is a, c, t, g, unknown, or other
agcaactaatcgtttcgccggaagaggagccatggttaagtttctaaagcagaacaaagcggtgatcctccttcaaggccgttacgccggcnagaaggcggtgatcatccgatccttcgacgacggaaaccgcgagcgtccctacggacactgcctcgtagccggactcaagaagtacccgagcaaggtcatccgcaaggactcggccaagaagacggcgaagaagtcgagggtcaagtgtttcatcaaggtggtgaattaccagcatctgatgcctactcgttacacgcttgacgtggatctgaaggaagtggccactctcgaagcactgtcttcgaaggataagaaggtggcggctcttaaggaggccaaggctaagctcgaggagaggttcaagactggaaagaacaggtggttcttcaccaagctcaggttctgagaaccttttatcctctttttttgtaatggaatctacagtatgct

SEQ ID NO: 1141 - protein, 135 aa, Brassica napus
  misc_feature: Ceres Clone ID no. 1033945
  misc_feature (1)..(135): Bit score of 328.3 for hmm based on sequences of FIGURE 4.
  misc_feature (52)..(135): Pfam Name: Ribosomal_L27e Pfam Description: Ribosomal L27e protein family
  misc_feature (7)..(40): Pfam Name: KOW Pfam Description: KOW motif
  misc_feature: Functional Homolog Of SEQ ID NO. 32
  misc_feature (21)..(21): Xaa is any aa, unknown, or other
MVKFLKQNKAVILLQGRYAGXKAVIIRSFDDGNRERPYGHCLVAGLKKYPSKVIRKDSAKKTAKKSRVKCFIKVVNYQHLMPTRYTLDVDLKEVATLEALSSKDKKVAALKEAKAKLEERFKTGKNRWFFTKLRF

SEQ ID NO: 1142 - DNA, 456 bp, Brassica napus
  misc_feature: Ceres Clone ID no. 949504
  misc_feature: Encodes the peptide sequence at SEQ ID NO. 1143
  misc_feature (415)..(415): n is a, c, t, g, unknown, or other
gtttttgtctctgcaagtaaccttttcgccggaagggagaagcagccatggttaagttcctgaagcagaacaaagcggttatcctcctccaaggccgttacgccgggaagaaggcagtgatcatccgctccttcgacgacggaaaccgcgagcgtccttacggacactgcctcgtcgcgggactgaagaagtatccgagcaaggtcatccgcaaggactcagccaagaagacggccaagaaatctcgagtcaagtgcttcatcaaggtggtgaactaccagcatctgatgcctactcgttacacattggacgtggatctgaaggaggttgcgactctggaagctctggcttcgaaggacaagaaggtggcggctcttaaggaggctaaggctaagctcgaggagaggttcaagancggaaaaaacaggtggttctttaccaagcttaggttcygag

SEQ ID NO: 1143 - protein, 136 aa, Brassica napus
  misc_feature: Ceres Clone ID no. 949504
  misc_feature (1)..(136): Bit score of 325.5 for hmm based on sequences of FIGURE 4.
  misc_feature (52)..(135): Pfam Name: Ribosomal_L27e Pfam Description: Ribosomal L27e protein family
  misc_feature (7)..(40): Pfam Name: KOW Pfam Description: KOW motif
  misc_feature: Functional Homolog Of SEQ ID NO. 32
  misc_feature (123)..(123): Xaa is any aa, unknown, or other
  misc_feature (136)..(136): Xaa is any aa, unknown, or other
MVKFLKQNKAVILLQGRYAGKKAVIIRSFDDGNRERPYGHCLVAGLKKYPSKVIRKDSAKKTAKKSRVKCFIKVVNYQHLMPTRYTLDVDLKEVATLEALASKDKKVAALKEAKAKLEERFKXGKNRWFFTKLRFX

SEQ ID NO: 1144 - DNA, 475 bp, Brassica napus
  misc_feature: Ceres Clone ID no. 1061233
  misc_feature: Encodes the peptide sequence at SEQ ID NO. 1145
agcttttttttcagcggcgatacgaagacgaaggagagggatctatctacacaagtgaagcaacaatggtgaagttcttgaagcagaacaaggcagtgatcctcctccaaggccgatacgccgggaagaaggcggtgatcatccgatccttcgacgacggaaaccgtgagcgtccttacggacactgcctcgtcgccggactcaagmagtacccgagcaaggtcatccgcaaggactcggcgaagaagacggccaagaaatctagggttaagtgtttcatcaaggtcgtcaactaccagcatttgatgcctacgcgttacaccctcgacgtggatctcaaggaagtcgcgaccctcgaggctctggcttcaaaggacaagaaggtcgctgctctcaaggaggcgaaggctaagctcgaggaacgtttcaagaccgggaagaacagatggttctttaccaaactcaggttctgaag

SEQ ID NO: 1145 - protein, 135 aa, Brassica napus
  misc_feature: Ceres Clone ID no. 1061233
  misc_feature (1)..(135): Bit score of 326.8 for hmm based on sequences of FIGURE 4.
  misc_feature (52)..(135): Pfam Name: Ribosomal_L27e Pfam Description: Ribosomal L27e protein family
  misc_feature (7)..(40): Pfam Name: KOW Pfam Description: KOW motif
  misc_feature: Functional Homolog Of SEQ ID NO. 32
  misc_feature (48)..(48): Xaa is any aa, unknown, or other
MVKFLKQNKAVILLQGRYAGKKAVIIRSFDDGNRERPYGHCLVAGLKXYPSKVIRKDSAKKTAKKSRVKCFIKVVNYQHLMPTRYTLDVDLKEVATLEALASKDKKVAALKEAKAKLEERFKTGKNRWFFTKLRF

SEQ ID NO: 1146 - DNA, 549 bp, Brassica napus
  misc_feature: Ceres Clone ID no. 972930
  misc_feature: Encodes the peptide sequence at SEQ ID NO. 1147
gccggaaaaaaagtagagacgaagccatggttaagtttctgaagcagaacaaagctgtgatcctccttcaaggccgttatgccggtaagaaggctgtcatcatccgttccttcgacgacggcaaccgcgagcgtccttacggacactgcctcgtcgccggactcaagaagtacccgagcaaggtcatccgcaaggactccgccaagaagactgcgaagaagtcgagagtcaagtgtttcatcaaagtcgttaactaccagcatctgatgcctactcgttacacgttggatgtagatctgaaggaagtggcgactctcgaggctctggcttctaagggcaagaaggtggcggctcttaaggaggctaaggctaagctcgagaagaggttcaagactgggaagaacaggtggttcttcaccaagctcaggttctgagaaccgagtctctttacagtctacttttgtagttctagaaatgaatgtggatcgtgttttggatggtttaagacttttggtttgaaattgactctggggtctcgtctttattact

SEQ ID NO: 1147 - protein, 135 aa, Brassica napus
  misc_feature: Ceres Clone ID no. 972930
  misc_feature (1)..(135): Bit score of 321.5 for hmm based on sequences of FIGURE 4.
  misc_feature (52)..(135): Pfam Name: Ribosomal_L27e Pfam Description: Ribosomal L27e protein family
  misc_feature (7)..(40): Pfam Name: KOW Pfam Description: KOW motif
  misc_feature: Functional Homolog Of SEQ ID NO. 32
MVKFLKQNKAVILLQGRYAGKKAVIIRSFDDGNRERPYGHCLVAGLKKYPSKVIRKDSAKKTAKKSRVKCFIKVVNYQHLMPTRYTLDVDLKEVATLEALASKGKKVAALKEAKAKLEKRFKTGKNRWFFTKLRF

SEQ ID NO: 1148 - DNA, 480 bp, Brassica napus
  misc_feature: Ceres Clone ID no. 871412
  misc_feature: Encodes the peptide sequence at SEQ ID NO. 1149
acttggttttttttttcagcggcgataaacaagacgaaggaragggatctacacaagtgaagcaacaatggtgaakttcttgaagcaraacarggcagtgatcctcctccaaggccgatacgccgggaagaaggcggtgatcatccgttccttcgacgacggaaaccgcgagcgtccttacgggcactgcctcgttgccgggctcaagaagtaccccagcaaggtcatccgcaaggactcagcgaaraaracggcgaaraaatctagggttaagtgtttcatcaaggtcgtcaactaccagcatctgatgcctacgcgttacaccctcgatgtggatctcaaggaagtcgcgaccctcgaggctctgtcttcaaaggacaagaaggtcgctgctctcaaggaggctaaggctaagctcgaggaacgtttcaagaccgggaagaacagatggttctttaccaaactcaggttctgaaggat

SEQ ID NO: 1149 - protein, 135 aa, Brassica napus
  misc_feature: Ceres Clone ID no. 871412
  misc_feature (1)..(135): Bit score of 313.5 for hmm based on sequences of FIGURE 4.
  misc_feature (7)..(40): Pfam Name: KOW Pfam Description: KOW motif
  misc_feature (52)..(135): Pfam Name: Ribosomal_L27e Pfam Description: Ribosomal L27e protein family
  misc_feature: Functional Homolog Of SEQ ID NO. 32
  misc_feature (3)..(3): Xaa is any aa, unknown, or other
  misc_feature (7)..(7): Xaa is any aa, unknown, or other
  misc_feature (9)..(9): Xaa is any aa, unknown, or other
  misc_feature (60)..(60): Xaa is any aa, unknown, or other
  misc_feature (61)..(61): Xaa is any aa, unknown, or other
  misc_feature (64)..(64): Xaa is any aa, unknown, or other
MVXFLKXNXAVILLQGRYAGKKAVIIRSFDDGNRERPYGHCLVAGLKKYPSKVIRKDSAXXTAXKSRVKCFIKVVNYQHLMPTRYTLDVDLKEVATLEALSSKDKKVAALKEAKAKLEERFKTGKNRWFFTKLRF

SEQ ID NO: 1150 - DNA, 461 bp, Brassica napus
  misc_feature: Ceres Clone ID no. 1094338
  misc_feature: Encodes the peptide sequence at SEQ ID NO. 1151
  misc_feature (126)..(126): n is a, c, t, g, unknown, or other
acctagagtttctagcggcgataggagagagagagagagagagagatctagacaagtgaagcaaaatggtgaagttcttgaagcagaacaaggccgtgatcctccttcaaggccgatacgccggtnagaaggccgtcatcatccgctccttcgacgacggaaaccgtgagcgtccttacggccactgcctcgtcgccggactcaaaaagtacccgagcaaggtcatccgcaaggactcggccaagaagactgcaaagaaatctagggtcaagtgtttcatcaaggtagttaactaccagcatctgatgcctacgcgttacaccctcgacgtggatctcaaggaagtggcgaccctcgaggccctttcttcaaaggacaagaaggtggcggctctcaaggaggctaagggtaagctcgaggagaggttcaagaccgggaagaacaggtggtgagggtgtgtc

SEQ ID NO: 1151 - protein, 128 aa, Brassica napus
  misc_feature: Ceres Clone ID no. 1094338
  misc_feature (1)..(128): Bit score of 289.7 for hmm based on sequences of FIGURE 4.
  misc_feature (52)..(128): Pfam Name: Ribosomal_L27e Pfam Description: Ribosomal L27e protein family
  misc_feature (7)..(40): Pfam Name: KOW Pfam Description: KOW motif
  misc_feature: Functional Homolog Of SEQ ID NO. 32
  misc_feature (21)..(21): Xaa is any aa, unknown, or other
MVKFLKQNKAVILLQGRYAGXKAVIIRSFDDGNRERPYGHCLVAGLKKYPSKVIRKDSAKKTAKKSRVKCFIKVVNYQHLMPTRYTLDVDLKEVATLEALSSKDKKVAALKEAKGKLEERFKTGKNRW

SEQ ID NO: 1152 - DNA, 546 bp, Glycine max
  misc_feature: Ceres Clone ID no. 1365899
  misc_feature: Encodes the peptide sequence at SEQ ID NO. 1153
agcttcaggtcagagagagtgagagacggcaaagacggaggagaggtcgcaaacgcaaaaatggtgaagtttctgaaaccaaacaaggccgtcattgtccttcagggacgctacgccggcaagaaagccgtgatcgttcgaaccttcgacgaaggaactcgcgagcgcccctacggccactgtttggtggcggggataaagaagtaccctgcgaaggtgatcaagaaggactcggcgaagaagacggcgaagaagtcgcgcgtgaaggcgttcgtgaagctcgtcaactaccagcacctcatgcccacgcgctacacgcttgacgtggacttgaaggacgcggttaaccccgacgttctcaacgcgaaggataagaaggtcactgctctcaaggagaccaagaagcgcctcgaggagaggttcaaaaccgggaagaaccggtggttcttcaccaagctcaggttctgagcggtaatcttatcgagttttgttattcgaatgcttttggatcttgctttaattgatactttataatgctgtgttgag

SEQ ID NO: 1153 - protein, 135 aa, Glycine max
  misc_feature: Ceres Clone ID no. 1365899
  misc_feature (1)..(135): Bit score of 330.0 for hmm based on sequences of FIGURE 4.
  misc_feature (52)..(135): Pfam Name: Ribosomal_L27e Pfam Description: Ribosomal L27e protein family
  misc_feature (7)..(40): Pfam Name: KOW Pfam Description: KOW motif
  misc_feature: Functional Homolog Of SEQ ID NO. 32
MVKFLKPNKAVIVLQGRYAGKKAVIVRTFDEGTRERPYGHCLVAGIKKYPAKVIKKDSAKKTAKKSRVKAFVKLVNYQHLMPTRYTLDVDLKDAVNPDVLNAKDKKVTALKETKKRLEERFKTGKNRWFFTKLRF

SEQ ID NO: 1154 - DNA, 597 bp, Solanum lycopersicum
  misc_feature: Ceres Annot ID no. 8460444
  misc_feature: Encodes the peptide sequence at SEQ ID NO. 1155
atggtgaagtttttgaagccaaacaaagctgttatccttcttcaaggcaagtatgccggccggaaagctgtgatcgtaagggcatttgatgaaggaacaagggacaggccatatggccattgtttggtcgcaggtatctccaagtacccgaagaaggtgatccgcaaggattcagcaaagaagcaggcgaagaaatctcgtgttaaggctttcatcaagctcgtgaactacaaccacatcatgcctactcgttacacactcgatgtggatctgaaggatgttgtcaatgctgatgttcttcaggcacgtgacaagaaggtgaccgctgcaaaggagaccaaggctaggcttgaggagaggttcaagaccgggaaaaatcgctggttctttaccaagcttagacgctgcagtagccaatttactgctctcatgtctatgttctgtgttgccttcttcggaaacccccacaacaacatcaataataacatagctagtgtgattgccatgaggaattgccaccggtgtagtgcaatagactctggtagtaattattccggaccaattcagcataatgcttccttatgggatggaatttga

SEQ ID NO: 1155 - protein, 198 aa, Solanum lycopersicum
  misc_feature: Ceres Annot ID no. 8460444
  misc_feature (1)..(198): Bit score of 328.8 for hmm based on sequences of FIGURE 4.
  misc_feature (52)..(135): Pfam Name: Ribosomal_L27e Pfam Description: Ribosomal L27e protein family
  misc_feature (7)..(40): Pfam Name: KOW Pfam Description: KOW motif
  misc_feature: Functional Homolog Of SEQ ID NO. 32
MVKFLKPNKAVILLQGKYAGRKAVIVRAFDEGTRDRPYGHCLVAGISKYPKKVIRKDSAKKQAKKSRVKAFIKLVNYNHIMPTRYTLDVDLKDVVNADVLQARDKKVTAAKETKARLEERFKTGKNRWFFTKLRRCSSQFTALMSMFCVAFFGNPHNNINNNIASVIAMRNCHRCSAIDSGSNYSGPIQHNASLWDGI

SEQ ID NO: 1156 - DNA, 414 bp, Sorghum bicolor
  misc_feature: Ceres Annot ID no. 8744162
  misc_feature: Encodes the peptide sequence at SEQ ID NO. 1157
atggtgaagttcctcaagcccggcaaggccgtgatcctactccagggccggttcgccggcaggaaggcggtgatcgtgcgcgtgttcgaggagggcacccgcgaccgcccctacggccactgcctcgtcgccgggctcgccaagtaccccaagaaggtgatccgcaaggactccgccaagaagacggccaagaagtcgcgcgtcaagtgcttcatcaagctcgtcaacttcacccacctcatgcccacccgctacaccctcgacgtcgacttcaaggacgtcgccaccggcgggcccgacgcgctctccacccgcgacaagaaggtcgccgcctgcaagaccgccaaggctcgcctcgaggagaggttcaagacaggcaagaacaggtggttctttaccaagctccgcttctag

SEQ ID NO: 1157 - protein, 137 aa, Sorghum bicolor
  misc_feature: Ceres Annot ID no. 8744162
  misc_feature (1)..(137): Bit score of 325.0 for hmm based on sequences of FIGURE 4.
  misc_feature (52)..(137): Pfam Name: Ribosomal_L27e Pfam Description: Ribosomal L27e protein family
  misc_feature (7)..(40): Pfam Name: KOW Pfam Description: KOW motif
  misc_feature: Functional Homolog Of SEQ ID NO. 32
MVKFLKPGKAVILLQGRFAGRKAVIVRVFEEGTRDRPYGHCLVAGLAKYPKKVIRKDSAKKTAKKSRVKCFIKLVNFTHLMPTRYTLDVDFKDVATGGPDALSTRDKKVAACKTAKARLEERFKTGKNRWFFTKLRF

SEQ ID NO: 1158 - DNA, 414 bp, Sorghum bicolor
  misc_feature: Ceres Annot ID no. 8702928
  misc_feature: Encodes the peptide sequence at SEQ ID NO. 1159
atggtgaagttcctcaagcccggcaaggccgtgatcctcctccagggccggttcgccggccggaaggcggtgatcgtgcgcgtgttcgaggagggcacccgcgaccgcccctacggtcactgcctcgtcgccggcctcgccaagtaccccaagaaggtgatccgcaaggactccgccaagaagacggccaagaagtcccgcgtcaagtgcttcatcaagctcgtcaacttcacccacctcatgcccacccgctacaccctcgacgtcgacttgaaggacgtcgcctcgggcgggcccgacgcgctctccacccgcgacaagaaggtcgaggcctgcaagaccgccaagtaccgtctcgaggagaggttcaagagcggcaagaacaggtggttctttaccaagctccgcttctag

SEQ ID NO: 1159 - protein, 137 aa, Sorghum bicolor
  misc_feature: Ceres Annot ID no. 8702928
  misc_feature (1)..(137): Bit score of 320.9 for hmm based on sequences of FIGURE 4.
  misc_feature (52)..(137): Pfam Name: Ribosomal_L27e Pfam Description: Ribosomal L27e protein family
  misc_feature (7)..(40): Pfam Name: KOW Pfam Description: KOW motif
  misc_feature: Functional Homolog Of SEQ ID NO. 32
MVKFLKPGKAVILLQGRFAGRKAVIVRVFEEGTRDRPYGHCLVAGLAKYPKKVIRKDSAKKTAKKSRVKCFIKLVNFTHLMPTRYTLDVDLKDVASGGPDALSTRDKKVEACKTAKYRLEERFKSGKNRWFFTKLRF

SEQ ID NO: 1160 - DNA, 717 bp, Triticum aestivum
  misc_feature: Ceres Clone ID no. 1018374
  misc_feature: Encodes the peptide sequence at SEQ ID NO. 1161
cccccgcacacaacccacaacccctccccaacccaccaccggcggcggcgcagcgcgaggaagaggaagcgaagatggtgaagttcctgaagccgggcaaggcggtgatcctgctgcagggcaggtacgccgggaagaaggcggtgatcgtgcgcgtgttcgaggagggcacccgcgaccgcccctacgggcactgcctcgtcgccggcctggccaagtacccgaagaaggtgatccgcaaggactcggccaagaagacggccaagaagtcccgcgtcaaggtgttcctcaagctcgtcaacttcacccacctcatgcccacccgctacaccctcgacgtcgacctcaaggaggtggcctccggcgcgcccgactccctcacctccaaggacaagaaggtgggcgccgccaaggccgccaaggccaagctcgaggagcggttcaagaccggcaagaacaggtggttyttcaccaagctccgcttytaggccagccgtttgaccggtcgcgcagggttgtctctgccgttactactacccgaaccctttacatttttagttgcttgttatcggtgactgttgctgcgcttaagatgtcctgttttggtattgcccatgaagaagactctgtttagtgtggatcttatgagatatgatgatgtttcatgtgttgaatcatgtgaagaatagatcttttgttggaattttgttgagcgtt

SEQ ID NO: 1161 - protein, 137 aa, Triticum aestivum
  misc_feature: Ceres Clone ID no. 1018374
  misc_feature (1)..(137): Bit score of 307.1 for hmm based on sequences of FIGURE 4.
  misc_feature (52)..(137): Pfam Name: Ribosomal_L27e Pfam Description: Ribosomal L27e protein family
  misc_feature (7)..(40): Pfam Name: KOW Pfam Description: KOW motif
  misc_feature: Functional Homolog Of SEQ ID NO. 32
  misc_feature (131)..(131): Xaa is any aa, unknown, or other
  misc_feature (137)..(137): Xaa is any aa, unknown, or other
MVKFLKPGKAVILLQGRYAGKKAVIVRVFEEGTRDRPYGHCLVAGLAKYPKKVIRKDSAKKTAKKSRVKVFLKLVNFTHLMPTRYTLDVDLKEVASGAPDSLTSKDKKVGAAKAAKAKLEERFKTGKNRWXFTKLRX

SEQ ID NO: 1162 - protein, 135 aa, Vitis vinifera
  misc_feature: Public GI ID no. 157348811
  misc_feature (1)..(135): Bit score of 335.0 for hmm based on sequences of FIGURE 4.
  misc_feature (52)..(135): Pfam Name: Ribosomal_L27e Pfam Description: Ribosomal L27e protein family
  misc_feature (7)..(40): Pfam Name: KOW Pfam Description: KOW motif
  misc_feature: Functional Homolog Of SEQ ID NO. 32
MVKFLKPNKAVVLLQGRFAGRKAVIVRSFDDGTRDRPYGHCLVAGIAKYPKKVIRKDSAKKTAKKSRVKAFIKLVNYNHIMPTRYTLDVDLKDVVSPDVLQSRDKKVTAAKETKKKLEERFKTGKNRWFFSKLRF

SEQ ID NO: 1163 - protein, 135 aa, Vitis vinifera
  misc_feature: Public GI ID no. 147855215
  misc_feature (1)..(135): Bit score of 331.5 for hmm based on sequences of FIGURE 4.
  misc_feature (52)..(135): Pfam Name: Ribosomal_L27e Pfam Description: Ribosomal L27e protein family
  misc_feature (7)..(40): Pfam Name: KOW Pfam Description: KOW motif
  misc_feature: Functional Homolog Of SEQ ID NO. 32
MVKFLKPNKAVVLLQGRFAGRKAVIVRSFDDGTRDRPYGHCLVAGIAKYPKKVIRKDSAKKTAKKSRVKAFIKLVNYNHIMPTRYTLDVNLKDVVSPDVLQSRDKKVTAAKETKKKLEERFKTGKNRWFFSKLRF

SEQ ID NO: 1164 - protein, 135 aa, Vitis vinifera
  misc_feature: Public GI ID no. 157338639
  misc_feature (1)..(135): Bit score of 335.4 for hmm based on sequences of FIGURE 4.
  misc_feature (52)..(135): Pfam Name: Ribosomal_L27e Pfam Description: Ribosomal L27e protein family
  misc_feature (7)..(40): Pfam Name: KOW Pfam Description: KOW motif
  misc_feature: Functional Homolog Of SEQ ID NO. 32
MVKFLKQNKAVVVLQGRFAGRKAVIVRSFDDGTRDRPYGHCLVAGIAKYPKKVIRKDSAKKTAKKSRVKAFIKLVNYNHLMPTRYTLDVDLKDVVTVDALQSRDKKVTAAKETKARFEERFKTGKNRWFFTKLRF

SEQ ID NO: 1165 - protein, 135 aa, Elaeis guineensis
  misc_feature: Public GI ID no. 192910854
  misc_feature (1)..(135): Bit score of 328.7 for hmm based on sequences of FIGURE 4.
  misc_feature (52)..(135): Pfam Name: Ribosomal_L27e Pfam Description: Ribosomal L27e protein family
  misc_feature (7)..(40): Pfam Name: KOW Pfam Description: KOW motif
  misc_feature: Functional Homolog Of SEQ ID NO. 32
MVKFLKPGKAVIVLQGRFAGRKAVIVRCFDEGTRDRPYGHCLVAGILKYPKKVIRKDSAKKTAKKSRVKAFLKMVNYSHIMPTRYTLDVDLKDVVTLDVLQSRDKKVAACKETKARFEERFKTGKNRWFFTKLRF

SEQ ID NO: 1166 - protein, 135 aa, Physcomitrella patens subsp. patens
  misc_feature: Public GI ID no. 168027593
  misc_feature (1)..(135): Bit score of 295.2 for hmm based on sequences of FIGURE 4.
  misc_feature (52)..(135): Pfam Name: Ribosomal_L27e Pfam Description: Ribosomal L27e protein family
  misc_feature (7)..(40): Pfam Name: KOW Pfam Description: KOW motif
  misc_feature: Functional Homolog Of SEQ ID NO. 32
MVKFLKPNKVVVLLQGRYAGRKAVIVKNFDDGTKERPYGHAIVCGIAKYPRKVIKKASQKTIAKRSRVKAFTKVVNYNHIMPTRYSLDVDLKSTVTADKLESTASRVEARKGAKAVLEERFKTGKNRWFFTKLRF

SEQ ID NO: 1167 - protein, 135 aa, Physcomitrella patens subsp. patens
  misc_feature: Public GI ID no. 168031587
  misc_feature (1)..(135): Bit score of 292.7 for hmm based on sequences of FIGURE 4.
  misc_feature (52)..(135): Pfam Name: Ribosomal_L27e Pfam Description: Ribosomal L27e protein family
  misc_feature (7)..(40): Pfam Name: KOW Pfam Description: KOW motif
  misc_feature: Functional Homolog Of SEQ ID NO. 32
MVKFLKPNKVVVLLQGRYAGRKAVIVKNFDDGTKERPYGHAIVCGIAKYPRKVIKKASQKTIAKRSRLKAFTKVVNYNHIMPTRYSLDVDLKNIVTADKLESTASRVEARKASKTVLEERFKTGKNRWFFSKLRF

SEQ ID NO: 1168 - protein, 135 aa, Physcomitrella patens subsp. patens
  misc_feature: Public GI ID no. 168049977
  misc_feature (1)..(135): Bit score of 292.8 for hmm based on sequences of FIGURE 4.
  misc_feature (52)..(135): Pfam Name: Ribosomal_L27e Pfam Description: Ribosomal L27e protein family
  misc_feature (7)..(40): Pfam Name: KOW Pfam Description: KOW motif
  misc_feature: Functional Homolog Of SEQ ID NO. 32
MVKFLKPNKVVVLLQGRYAGRKAVIVKNFDDGTKERPYGHAIVCGIAKYPRKVIKKASQKTIAKRSRLKAFTKVVNYNHIMPTRYSLDVDLKNTVTADKLESTASRVESRKAAKAVLEERFKTGKNRWFFSKLRF

SEQ ID NO: 1169 - protein, 135 aa, Physcomitrella patens subsp. patens
  misc_feature: Public GI ID no. 168061210
  misc_feature (1)..(135): Bit score of 288.8 for hmm based on sequences of FIGURE 4.
  misc_feature (52)..(135): Pfam Name: Ribosomal_L27e Pfam Description: Ribosomal L27e protein family
  misc_feature (7)..(40): Pfam Name: KOW Pfam Description: KOW motif
  misc_feature: Functional Homolog Of SEQ ID NO. 32
MVKFLKPNKVVVLLQGRYAGRKAVIVKNFDDGTKERPYGHAIICGIAKYPRKVIKKASQKTIAKRSRLKAFTKVVNYNHIMPTRYSLDVDLKSTLTADKLESTAGRVEARKGAKAVLEERFKTGKNRWFFSKLRF

SEQ ID NO: 1170 - protein, 135 aa, Ostreococcus lucimarinus CCE9901
  misc_feature: Public GI ID no. 145346330
  misc_feature (1)..(135): Bit score of 272.3 for hmm based on sequences of FIGURE 4.
  misc_feature (52)..(135): Pfam Name: Ribosomal_L27e Pfam Description: Ribosomal L27e protein family
  misc_feature (7)..(40): Pfam Name: KOW Pfam Description: KOW motif
  misc_feature: Functional Homolog Of SEQ ID NO. 32
MVKFLKPGKVVVVLQGRYAGKKAVIVKNVDDGSSAHPYGHALVCGLSTIPRKVTKKMDEKKQAKRSRCKTFIKNVNYSHLMPTRYTLDVDLKNVVTSDALDNATKKVAAQKEAKKLLEERFKTGKSRWFFTRLAF

SEQ ID NO: 1171 - protein, 476 aa, Zea mays
  misc_feature: Public GI ID no. 194696788
  misc_feature (1)..(476): Bit score of 1192.3 for hmm based on sequences of FIGURE 16.
  misc_feature (108)..(128): Pfam Name: IQ Pfam Description: IQ calmodulin-binding motif
  misc_feature: Functional Homolog Of SEQ ID NO. 922
MGKKGKWFGAVKKVFSPESKEKKEERLRRKSAASNPAPVDLTPSTSLEVNVSVPPPPAPPPVPRQTDEVRVPEAEQEQSKHVTLEEAPAAAAAPAQAPVLPPGAPTEELAAIKIQTAFRGYLARRALRALRGLVRLKSLVEGNSVKRQSASTLRCMQTLSRVQSQIRSRRAKMSEENQALQRQLLLKQELENFRMGENWDDSTQSKEQIEASLISRQEAAIRRERALAYAFSHQWKSTSRSANPMFVDPNNLQWGWSWLERWMAAKPWEGRNGTDKESNIDRGSVKNMSLNLGVGEGEITKAFNRRDSKPEKPSPPTPKPARPASRQSPSTPSARVAPIPARRKSSTPKNGLSQVDDDVRSVLSVQSERPRRHSIATTSTMRDDESLASSPSLPSYMVPTESARAKSRTATANGAETPEKGGSAGPVKKRLSFQGGAAAASPMRRHSGPPKVESAVKDIAAPPQPEALVANGGGSK

SEQ ID NO: 1172 - protein, 1109 aa, Vitis vinifera
  misc_feature: Public GI ID no. 157358362
  misc_feature (1)..(1109): Bit score of 1115.3 for hmm based on sequences of FIGURE 10.
  misc_feature (58)..(178): Pfam Name: MATH Pfam Description: MATH domain
  misc_feature: Functional Homolog Of SEQ ID NO. 389
MTLMTPPPLDQEDDEMLVPHTDFADGPQPMEVAQPDTASAVDAQTVEDPPSARFTWTIENFSRLNTKKLYSDVFYVGGYKWRVLIFPKGNNVDHLSMYLDVADSATLPYGWSRYAQFSLAVINQIHNKFTIRKDTQHQFNARESDWGFTSFMPLGELYDPARGYLVNDTCIVEADVAVRRVIDYWTHDSKKETGYVGLKNQGATCYMNSLLQTLYHIPYFRKAVYHMPTTENDMPSGSIPLALQSLFYKLQYSDTSVATKELTKSFGWDTYDSFMQHDVQELNRVLCEKLEDKMKGTVVEGTIQQLFEGHHMNYIECINVDYKSTRKESFYDLQLDVKGCRDVYASFDKYVEVERLEGDNKYHAEIHGLQDARKGVLFIDFPPVLQLQLKRFEYDFMRDTMVKINDRYEFPLQLDLDRENGKYLSPDADRSVRNLYTLHSVLVHSGGVHGGHYYAYIRPTLSDQWFKFDDERVTKEDIKRALEEQYGGEEELPQTNPGFNNSPFKFTKYSNAYMLVYIRESDKEKIICNVDEKDIAEHLRIRLKKEQEEKEQKRKEKAEAHLYTIIKVARNEDLIEQIGRDIYFDLVDHDKVRSFRIQKQTPFNLFKEEVAKEFGIPVQFQRFWLWAKRQNHTYRPNRPLTLQEEAQSVGQLREVSNKANHAELKLFLEVELGQDLRPVPPPEKTKEEILLFFKLYDPLKEELRYVGRLFVKGSGKPIEILSKLNELAGFSPNEEIELFEEIKFEPNVMCEHIDKRLTFRASQLEDGDIICYQRLLQIDSSQQCRYPDVPSFLEYVHNRQVVRFRSLEKPKEDEFCLELSKLFNYDDVVERVAAHLGLDDSSKIRLTSHNCYSQQPKPQPIKYRGVEHLSDMLLHYNQTSDILYYEVLDIPLPELQGLKTLKVAFHHATKEEVVIHTIRLPKQSTVGDVINDLKSKVELSHPNAELRLLEVFYHKIYKIFPLNEKIENINDQYWTLRAEEIPEEEKNLGPHDRLIHVYHFMKDTTQNQVQVQNFGEPFFLVIHEGETLAEVKVRIQKKLQVPDEEFSKWKFAFLSLGRPEYLQDSDIRRDVYGAWEQYLGLEHSDNAPKRSYAANQNRHTFEKPVKIYN

SEQ ID NO: 1173 - protein, 1101 aa, Vitis vinifera
  misc_feature: Public GI ID no. 157343371
  misc_feature (1)..(1101): Bit score of 1095.3 for hmm based on sequences of FIGURE 10.
  misc_feature (44)..(164): Pfam Name: MATH Pfam Description: MATH domain
  misc_feature: Functional Homolog Of SEQ ID NO. 389
MLVPHTDLADGHQPMEVVAQEETTSTVENQPVEDPPTSRFTWRIENFSRLNTKKHYSENFIVGGYKWRVLIFPKGNNVEHLSMYLDVADSSSLPYGWSRYAQFSLAVVNQIHNKYTVRKDTQHQFNARESDWGFTSFMPLSELYDPGRGFLVSDTCIVEAEVAVRRVVDYWTYDSKKETGYVGLKNQGATCYMNSLLQTLYHIPYFRKAVYHMPTTENDMPSGSIPLALQSLFYKLQYSDSSVATKELTKSFGWDTYDSFLQHDVQELNRVLCEKLEDKMKGTVVEGTIQQLFEGHHMNYIECINVDYKSTRKESFYDLQLDVKGCHDVYASFDKYVEVERLEGDNKYHAEHHGLQDARKGVLFIDFPPVLQLQLKRFEYDFMRDTMVKINDRYEFPLQLDLDRENGKYLSPDANRTVRNLYALHSVLVHSGGVHGGHYYAFIRPTLSDQWYKFDDERVTKEDVKRALEEQYGGEEELPQTNPGLNNTPFKFTKYSNAYMLVYIRESDKDKIICNVDEKDIAEHLRERLKKEQEEKEHKKKEKAESHLYTIIKVARDDDLVEHIGRDIYFDLVDHDKVRSFRIQKQMPFNFFKEEVAKEFGIPIQFQRFWLWAKRQNHTYRPNRPLTHLEEQQSVGQLREISNKVQNAELKLFLEVNLGPDLHPNPPPEKTKDDILLFFKLYDPEKEELNYVGRLFVKSTGKPVEILSKLNEMVGYAPDEEIELYEEIKFDPSVMCEPIDKKFTFRASQLEDGDIICFQKTPPIESGESFRYPDVPSFLEYVHNRQVVHFRSLEKPKEDDFCLEMSKLFTYDDVVERVARQLGLDDPSKIRLTSHNCYSQQPKPQPIKYRGVDHLSDMLVHYNLISDVLYYEVLDIPLPELQGLKTLKVAFHHAEKEEVVSHSIRLPKQSTVGDVINALKTKVELSHPNAEVRLLEVFYHKIYKVFPSNEKIENINDQYWTLRAEEIPEEEKNLGPQDRLIHVYHFTKDTAQNQMQIQNFGEPFFLVIHEGETLAEVKVRIQKKLLVPEEEFAKWRFAFLSLGRPEYLQDSDIVSSRFQRRDVYGAWEQYLGLEHSDTAPKRAYAANQNRHTFEKPVKIYN

SEQ ID NO: 1174 - DNA, 2024 bp, Panicum virgatum
  misc_feature: Ceres Clone ID no. 1727738
  misc_feature: Encodes the peptide sequence at SEQ ID NO. 1175
gttctctctccctcgtcactctcgccactgctcccagctgttgcgacctccgatcatccaaggctcctgcacccctgtcagtcctagctccagccaaaaatcgttggcttccgctgcctgctcctccgccttgcacctcccatgaccttccacgcgacatgattgcattgcaggcccctgcggagctcagtgtcctcccacgccgctgacgccttcttgttgcctccccgctgctgcgcacaaccgaaagggccttcctctcttcctttgcttccgcggaaagatttggcgatttgttcatctactaaagttgcatctctcttggtgattgtttcgaggagtgtggagtggagccatggggaagaagggcaagtggttcggcgcggtcaagaaagtgttcagccctgaatccaaggagaagaaggaggagaggcagaggaggaaatcagcagctagcaaccctactccacgagatctgaccccgtcgacctccttggaagtcaatgtttcggtgccaccccctccagctcctccggcccttcaccagattgaggaaatcagggcccctgaagctgagcaggagcagagcaagcacgtcaccgtagaggaggctcctgctgcccctgcacaggcgtcggtgctgccacctggtgtgccaagtgaagagcttgctgcaatcaagattcagactgccttccgaggttacctggcaaggagggcactgcgagcgctgcggggccttgttcgattgaaatcattggttgagggtgattcagttaggcgtcaatctgcaagcactcttcgctgtatgcagactctatcgcgggtgcagtcacaaatacgttctaggagagcaaagatgtctgaggagaaccaggcccttcagcgccagctcctactgaagcaggaactggagaatttcaggatgggtgagaactgggatgacagcactcaatccaaagagcaaatcgaggcaagcctaataagcaggcaagaggcagcgattagaagagaaagagcgcttgcatatgcattttcacatcagtggaagagcacttcgagatctgtcaacccaatgtttgtagacccaaacaacttgcagtggggctggagctggttggagcgctggatggctgcaaaaccttgggagggctgcaatggggctgataaggagagcaacattgaccgtggatctgttaagagcatgagcttgaaccttggagagggtgagatcacaaaagctttcaaccgccgggactcaaagccagaaaagccatcaccgccaactccaaaactaacccgtccagcctccaggcaatccccttcgacgccctctgctaaagtagcgccaatacctgctaggagaaaatccgccacgccagagaatgggctttcacatgtggatgacgatgcgagaagtgtgttcagcgtgcagtctgagcgaccaaggaggcacagtatagccacctcgactgtgcaggacaatgagagtctcgcaagctccccatcactcccaagttacatggttcccacagaatctgcaagggcgaagtctcgtctccagggatcagcattgactaatggtgcagagacaccagagaaaggaagctctgctggaccggtcaagaaaaggttgtcatttcaaggtggaacagcggctgcctcaccaatgcgacggcattctggtcctcccaaggtggacagtgcggtgaaggatattgttgccccaccacagccagaggccttggtgatcaatggtggaagcaagtgactcataccaggaggggaaagcggattatgaatatatattttatcgatgaagaaaggttaacgtgatatcagctcaatgagtgatttgaattgttttcttacgaccacattgtttgctctataagattcgcagtacctgccagttgattccattcgttgtttctgtaaaacaagtatcggttcgtcactagaatcaatgaagtttgtatgtaaacaggtcttctatttatgtgagccatatatttcttcttctg

SEQ ID NO: 1175 - protein, 471 aa, Panicum virgatum
  misc_feature: Ceres Clone ID no. 1727738
  misc_feature (1)..(471): Bit score of 1128.5 for hmm based on sequences of FIGURE 16.
  misc_feature (104)..(124): Pfam Name: IQ Pfam Description: IQ calmodulin-binding motif
  misc_feature: Functional Homolog Of SEQ ID NO. 922
MGKKGKWFGAVKKVFSPESKEKKEERQRRKSAASNPTPRDLTPSTSLEVNVSVPPPPAPPALHQIEEIRAPEAEQEQSKHVTVEEAPAAPAQASVLPPGVPSEELAAIKIQTAFRGYLARRALRALRGLVRLKSLVEGDSVRRQSASTLRCMQTLSRVQSQIRSRRAKMSEENQALQRQLLLKQELENFRMGENWDDSTQSKEQIEASLISRQEAAIRRERALAYAFSHQWKSTSRSVNPMFVDPNNLQWGWSWLERWMAAKPWEGCNGADKESNIDRGSVKSMSLNLGEGEITKAFNRRDSKPEKPSPPTPKLTRPASRQSPSTPSAKVAPIPARRKSATPENGLSHVDDDARSVFSVQSERPRRHSIATSTVQDNESLASSPSLPSYMVPTESARAKSRLQGSALTNGAETPEKGSSAGPVKKRLSFQGGTAAASPMRRHSGPPKVDSAVKDIVAPPQPEALVINGGSK

SEQ ID NO: 1176 - DNA, 2015 bp, Panicum virgatum
  misc_feature: Ceres Clone ID no. 1859266
  misc_feature: Encodes the peptide sequence at SEQ ID NO. 1177
tcactctcgccactgctcccagctgttgcgacttgcgacctccgatcatccaaggctcctgcacccctgtcagtcctagctccagccaaaaatcgttggcttccgctgcctgctcctccgccttgcacctcccatgaccttccacgcgacatgattgcattgcaggcccctgcggagctcagtgtcctcccacgccgctgacgccttcttgttgcctccccgctgctgcgcacaaccgaaagggccttcctctcttcctttgcttccgcggaaagatttggcgatttgttcatctactaaagttgcatctctcttggtgattgtttcgaggagtgtggagtgaagccatggggaagaagggcaagtggttcggcgcggtcaagaaagtgttcagccctgaatccaaggagaagaaggaggagaggcagaggaggaaatcagcagctagcaaccctactccacgagatctgaccccgtcgacctccttggaagtcaatgtttcggtgccaccccctccagctcctccggcccttcaccagattgaggaaatcagggcccctgaagctgagcaggagcagagcaagcacgtcaccgtagaggaggctcctgctgcccctgcacaggcgtcggtgctgccacctggtgtgccaagtgaagagcttgctgcaatcaagattcagactgccttccgaggttacctggcaaggagggcactgcgagcgctgcggggccttgttcgattgaaatcattggttgagggtgattcagttaggcgtcaatctgcaagcactcttcgctgtatgcagactctatcgcgggtgcagtcacaaatacgttctaggagagcaaagatgtctgaggagaaccaggcccttcagcgccagctcctactgaagcaggaactggagaatttcaggatgggtgagaactgggatgacagcactcaatccaaagagcaaatcgaggcaagcctaataagcaggcaagaggcagcgattagaagagaaagagcgcttgcatatgcattttcacatcagtggaagagcacttcgagatctgtcaacccaatgtttgtagacccaaacaacttgcagtggggctggagctggttgaagcgctggatggctgcaaaaccttgggagggctgcaatggggctgataaggagagcaacattgaccgtggatctgttaagagcatgagcttgaaccttggagagggtgagatcacaaaagctttcaaccgccgggactcaaagccagaaaagccatcaccgccaactccaaaactgacccgtccagcctccaggcaatccccttcgacgccctctgctaaagtagcgccaatacctgctaggagaaaatccgccacgccaaagaatgggctttcacatgtggatgacgatgcgagaagtgtgttcagcgtgcagtctgagcgaccaaggaggcacagtatagccacctcgactgtgcaggacaatgagagtctcgcaagctccccatcactcccaagttacatggttcccacagaatctgcaggggcgaagtctcgtctccagggatcagcattgactaatggtgcagagacaccggagaaaggaagctctgctggaccggtcaagaaaaggttgtcatttcaaggtggaacagcggctgcctcaccaatgcgacggcattctggtcctcccaaggtggacagtgtggtgaaggatattgttgccccaccacagccagaggccttggtgatcaatggtggaagcaagtgactcataccaggaggggaaagcggattatgaatatatattttatcgatgaagaaaggttaacgtgatatcagctcaatgagtgatttgaattgttttcttacgaccacattgtttgctctataagattcgcagtacctgccagttgattccattcgttgtttctgtaaaacaagtatcggttcgtcactagaatcaatgaagtttgtatgtaaacaggtcttctatttatgtgagccatatatttcttcttct

SEQ ID NO: 1177 - protein, 471 aa, Panicum virgatum
  misc_feature: Ceres Clone ID no. 1859266
  misc_feature (1)..(471): Bit score of 1119.4 for hmm based on sequences of FIGURE 16.
  misc_feature (104)..(124): Pfam Name: IQ Pfam Description: IQ calmodulin-binding motif
  misc_feature: Functional Homolog Of SEQ ID NO. 922
MGKKGKWFGAVKKVFSPESKEKKEERQRRKSAASNPTPRDLTPSTSLEVNVSVPPPPAPPALHQIEEIRAPEAEQEQSKHVTVEEAPAAPAQASVLPPGVPSEELAAIKIQTAFRGYLARRALRALRGLVRLKSLVEGDSVRRQSASTLRCMQTLSRVQSQIRSRRAKMSEENQALQRQLLLKQELENFRMGENWDDSTQSKEQIEASLISRQEAAIRRERALAYAFSHQWKSTSRSVNPMFVDPNNLQWGWSWLKRWMAAKPWEGCNGADKESNIDRGSVKSMSLNLGEGEITKAFNRRDSKPEKPSPPTPKLTRPASRQSPSTPSAKVAPIPARRKSATPKNGLSHVDDDARSVFSVQSERPRRHSIATSTVQDNESLASSPSLPSYMVPTESAGAKSRLQGSALTNGAETPEKGSSAGPVKKRLSFQGGTAAASPMRRHSGPPKVDSVVKDIVAPPQPEALVINGGSK

SEQ ID NO: 1178 - protein, 466 aa, Vitis vinifera
  misc_feature: Public GI ID no. 157347478
  misc_feature (1)..(466): Bit score of 983.8 for hmm based on sequences of FIGURE 16.
  misc_feature (112)..(132): Pfam Name: IQ Pfam Description: IQ calmodulin-binding motif
  misc_feature: Functional Homolog Of SEQ ID NO. 922
MGRKGNWLSSVKKALSPEPKEKKDQRADKSKKKWFGKHKYPDPNPSSLETVPGPSLAPPEEVKTIEPDNEHHKHVYSVAATTTMASLDVPETDVEVVEITTLTQSTGKAKEEAAAIKIQTAFRGYLARRALRALRGLVRLQSLIQGTAVKRQAANTLRCMQTLARVQSQICYRRIRMSEENQALQRQLLQKQAKEFEQLKMGEEWDDSLQSKEQIEAGLLNKQGAAMRRERALAYAFSHQQAWKNSSKSTNLLFMDPSNPHWGWSWLERWMAARPWESRSTTDKELNNDQLSIKSGSRSITGGEITKAYARHLLDSSKPSPTASQKPYHPPARQSPSTPPSKALENLSLQQAQGGICGSMVSIQSERFRRHSIAGSSVGDDESLASSPAVPSYMAPTKSAKAKSRLQSPLGLENNGTPEKGSSGIAKKRLSFPASPARPRRHSGPPRVESSSLTEGIVSNGGGTVS

SEQ ID NO: 1179 - protein, 1118 aa, Lotus japonicus
  misc_feature: Public GI ID no. 164605535
  misc_feature (1)..(1118): Bit score of 1176.6 for hmm based on sequences of FIGURE 10.
  misc_feature (61)..(181): Pfam Name: MATH Pfam Description: MATH domain
  misc_feature: Functional Homolog Of SEQ ID NO. 389
MTVMTPAPIDQQEDEEMLVPHTDLPENNHQPMEVVAQPEAAPTVESQPVEEPPQSRFTWRIDNFSRMNVKKLYSEVFVVGGYKWRVLIFPKGNNVDYLSMYLDVADSTNLPYGWSRYAQFSLAVVNQIQNKYTVRKDTQHQFNARESDWGFTSFMPLGELYDPSRGYLLNDTLVVEAEVLVRRIVDYWTYDSKKETGYVGLKNQGATCYMNSLLQTLYHIPYFRKAVYHMPTTENDMPAGSIPLALQSLFYKLQYSDTSVATKELTKSFGWDTYDSFMQHDVQELNRVLCEKLEDKMKGTVVEGTIQKLFEGHHMNYIECINVDYKSTRKESFYDLQLDVKGCHDVYASFDKYVEVEPLEGDNKYHAEQYGLQDAKKGVLFIDFPPVLQLQLKRFEYDFMRDTMVKINDRYEFPLELDLDRDDGKYLSPDADRNVRNLYTLHSVLVHSGGVHGGHYYAFIRPTLSDQWYKFDDERVTKEDTKRALEEQYGGEEELPQTNPGFNNTPFKFTKYSNAYMLVYIREADKDKVICNVDEKDIAEHLRERLKKEQEEKEHKKKEKAEAHLYTIIKVARNEDLKEQIGKDIYFDLVDHDKVRSFRVQKQMSFNLFKEEVAKEFGIPVQFQRFWLWAKRQNHTYRPNRPLTPAEEAQSVGQVREVSNKVHNAELKLFLEVELGPDLRPIAPSDKTKDDILLFFKLYDPEKEELRYVGRLFVKSTGKPSEILTRLNEMAGYDPDEEIGLYEEIKFEPNVMCEPIDKKLTFRASQLEDGDIICFQKAPAMDSEEHVRYPDVPSYLEYVHNRQVVHFRSLDKPKEDDFCLEMSRLYTYDDVVEKVAQQLNLDDPSKIRLTPHNCYSQQPKPQPIKYRGVDHLSDMLVHYNQTSDILYYEILDIPLPELQGLKTLKVAFYHATKDEVVSHTIRLPKQSTVGDVLDDLKTKVELSHPNAELRLLEVFYHKIYKVFPPNEKIETINDQYWTLRAEEVPEEEKNLGPHDRLIHVYHFTKDTSQNQMQIQNFGEPFFLVIREGETLTEIKVRIQKKLQVPDDEFEKWKFAFFALGRPEYLQDSDIVSNRFQRRDVYGAWEQYLGLEHTDNAPKRSYAVNQNRHTFEKPVKIYN

SEQ ID NO: 1180 - protein, 1114 aa, Vitis vinifera
  misc_feature: Public GI ID no. 157349974
  misc_feature (1)..(1114): Bit score of 1139.2 for hmm based on sequences of FIGURE 10.
  misc_feature (60)..(180): Pfam Name: MATH Pfam Description: MATH domain
  misc_feature: Functional Homolog Of SEQ ID NO. 389
MTLMTPAPLDQQEDEEMLVPHSDLVEGPQPMEVVAQADASSAVENQPVEDPQTSRFTWTIENFSRLNTKKHYSEIFVVGGFKWRVLIFPKGNNVDHLSMYLDVADSATLPYGWSRYAQFSLSVVNQIHNKYSIRKDTQHQFNARESDWGFTSFMPLSDLYDPGRGYLVNDTCIIEAEVAVRKILDYWTYDSKKETGFVGLKNQGATCYMNSLLQTLYHIPYFRKAVYHMPTTENDMPSGSIPLALQSLFYKLQYNDNSVATKELTKSFGWDTYDSFMQHDVQELNRVLCEKLEDKMKGTVVEGTIQQLFEGHHMNYIECINVDYKSTRKESFYDLQLDVKGCRDVYASFDKYVEVERLEGDNRYQAENHGLQDAKKGVLFIDFPPVLQLQLKRFEYDFMRDTMVKINDRYEFPLQLDLDRENGKYLSPDADRSVRNLYTLHSVLVHSGGVHGGHYYAFIRPTLSDQWFKFDDERKILGGHWRNSMVARKRHLPQTNPGFNNTPFKFTKYSNAYMLVYIRESDKEKIICNVDEKDIAEHLRIRLKKEQEEKEDKRKYKAQAHLFTIIKVARDEDLAEQIGKDIYFDLVDHDKVRSFRIQKQWPFTLFKEEVAKEFGIPVQYQRFWIWAKRQNHTYRPNRPLTPQEEAQSVGQLREVSTKVNNAELKLFLEVELGPDLRPIPPPEKTKEDILLFFKLYDPEKEELRYVGRLFVKSSGKPIEILTKLNEMAGFAPDEEIELYEEIKFEPCVMCEHLAKRTSFRFSQIEDGDIICFQKSAPPESEEQCRYSDVTSFLEYVQNRQVVHFRALERPKEDDFCLELSKLHNYDDVVERVARRLGLDDPSKIRLTSHNCYSQQPKPQPIKYRGVEHLSDMLVHYNQSSDILYYEVLDIPLPELQGLKNLKVAFHHATKDDVIIHNIRLPKQSTVGDVINELKTKVELSHPNAELRLLEVFYHKIYKIFPPSEKIENINDQYWTLRAEEAKEEKNLGPHDRLIHVYHFTKETVQNQMQVQNFGEPFFLIIHEGETLAEVKERIQKKLQVPDEEFSKWKFAFLSLGRPEYLQDSDIVSSRFQRRDVYGAWEQYLGLEHSDTAPKRAYAANQNRHTFEKPVKIYN

SEQ ID NO: 1181 - DNA, 1818 bp, Panicum virgatum
  misc_feature: Ceres Clone ID no. 1901601
  misc_feature: Encodes the peptide sequence at SEQ ID NO. 1182
gaggaaaatgtcgggctgcttgcccttccttgccttttggcttgcagccgagacattgaagacacagtaatagaacacaaaagaatgggtaagaagggaaagtggtttagtgctgtgaagaaagtcttcggctcctccgatcctgatggaaagcaagcaaaggctgagaaggcggacaagtcaaaatccaggaggagatggccatttggaaagtcgaggcactctgatccttctgcctcaacggtgtcagggactgctccagtagctcctttgccgccgccgccaccaatacaacttactcagccacactctcaggagattaaagatgtcaagccagttgaaacagacagtgagcagaacaagcatgcatactctgttgcccttgcatctgctgttgctgctgaagctgcagcagttgctgcccaggccgctgctgaggttgtccgcctcacagcagttactacggcagcaccaaaaatgcctgttacttcaagggaagaacttgcggccatcaagattcagaccgccttcagaggttatctggcaaggagagcattgcgcgcactaagagggctagttagattgaagtcacttgttgatggacatgccgtcaagcgccaaactgctcatactttgcattgcacacaaacgatgacaagagttcaagctcaaatctactctagaagggtgaaattggaggaggaaaaacaggctcttcaaaggcagctccaattgaaacatcaaagggaacttgagaaaatgaagattgatgaagactgggatcacagccatcaatccaaagaacaaattgaggccagcctagttatgaaacaagaagctgcgctaagacgagaaagagcactcgcatatgctttttctcatcagtggagaaattctggtcgaactataaccccaactttcacagaacctggtaatcctaactggggctggagctggatggaacgctggatgacagcaagaccttgggagagccgattggcagcatcagacaaggatcctaaagagcgttctctgacaaagaattccagcaccagtgctgttcgaatgtctgtaccccgtgccatctcaatccagaggccagcaacaccaaacaagtcaagccgtccaccaagccggcaatcaccttcaacaccgccatcgaaggcaccatctacctcaggaaagaccaggccggcaagtccaaggagcagctggctgtacaaggaagatgacctgaggagcatcacaagcatacgctctgaacgcccaaggaggcagagcataggtggaggctcggtccgggatgatgcaagcctgactagcacaccacctctccccagttatatgcagtcgacagagtctgcgagagcaaagtctcgataccgcagcttattgactgagaaacttgagctttcagagagggcacctctggcccattcagttgttaagaagcgcctctccttcccagtcattgacaaaccgagcggtccaccggcagataagccaaaggaaagggtgagacgccattcagaccctccgaaagtcgatccggcaacactgaaggatgctcctgttgcctgatcaggcccttgtgattgttaggtttcatgctgttttaactccatgatgaaatttctaagattgttttctctgtgtaatgtatgatctgtccgggttgatttgagaattgagacaattctaactgtgtttgcagacatggttttctccctgtagattgacacgtgtgatgctaacagtgtgtgctgttggctttcaatgtaccatataacggtttttgacagactttcttaacgtgtg

SEQ ID NO: 1182 - protein, 498 aa, Panicum virgatum
  misc_feature: Ceres Clone ID no. 1901601
  misc_feature (1)..(498): Bit score of 576.9 for hmm based on sequences of FIGURE 16.
  misc_feature (139)..(159): Pfam Name: IQ Pfam Description: IQ calmodulin-binding motif
  misc_feature: Functional Homolog Of SEQ ID NO. 922
MGKKGKWFSAVKKVFGSSDPDGKQAKAEKADKSKSRRRWPFGKSRHSDPSASTVSGTAPVAPLPPPPPIQLTQPHSQEIKDVKPVETDSEQNKHAYSVALASAVAAEAAAVAAQAAAEVVRLTAVTTAAPKMPVTSREELAAIKIQTAFRGYLARRALRALRGLVRLKSLVDGHAVKRQTAHTLHCTQTMTRVQAQIYSRRVKLEEEKQALQRQLQLKHQRELEKMKIDEDWDHSHQSKEQIEASLVMKQEAALRRERALAYAFSHQWRNSGRTITPTFTEPGNPNWGWSWMERWMTARPWESRLAASDKDPKERSLTKNSSTSAVRMSVPRAISIQRPATPNKSSRPPSRQSPSTPPSKAPSTSGKTRPASPRSSWLYKEDDLRSITSIRSERPRRQSIGGGSVRDDASLTSTPPLPSYMQSTESARAKSRYRSLLTEKLELSERAPLAHSVVKKRLSFPVIDKPSGPPADKPKERVRRHSDPPKVDPATLKDAPVA

SEQ ID NO: 1183 - DNA, 2087 bp, Panicum virgatum
  misc_feature: Ceres Clone ID no. 1998974
  misc_feature: Encodes the peptide sequence at SEQ ID NO. 1184
ggcaccgggagcgtgaccgtcacgagggggcgaagccccggggaagagccggagaggagatcgagagcggcccatcgcccccacaccacgccccacctccggctgcccgcctcccccgccgccgtggtccgcggctgcgggcggggccacgcgcccggctgggggtgaacagcgcgggacggggtcaccgtcgggcggtggggtgggcgaatcgatcctgcgtgcggggttgggctggccgataaaagggggcgcctttggactggcgaggcttgccgccgagacattgaagacacagtaatagaacacaaaaaatgggtaaaaagggaaagtggtttagtgctgtcaagaaagtcttcggctcctctgatccagatggaaaggaagcaaaggttgagaaggcggataagtcaaaatccaggaggagatggccatttggaaagtcgaggcactctgatccttctacctcaatggtgtcagggactgctccagtagctccgttgcctccgccaccaccaatacaacttactcagccacactcccaggagattaaagatgtcaagccagttgaaacagacagtgagcagaacaagcatgcatactctgttgcccttgcatccgctgttgctgctgaagctgctgcagttgctgcccaggccgctgctgaggttgtgcgcctcacagcagttaccacggcagcaccaaaaatgcctgttacttcaagggaagaacttgccgccatcaagattcagactgccttcaggggttatctggcaaggagagcattgcgggcactaagagggctagttagattgaagtcacttgtcgatggaaatgctgtcaagcgccaaacttctcacactttgcattgcacacaaacgatgacaagagttcaaactcaaatctactctagaagggtgaagttggaggaggaaaaacaagctcttcaaaggcagctccaattgaaacatcaaagggaacttgagaaaatgaagattgaagaagactgggatcacagccatcaatccaaagaacaaattgaggccagcctagttatgaaacaagaagctgcactaaaacgagaaagagcacttgcatatgcattttctcaccagtggagaaattctggtcgaactataaccccaactttcacagaacctgggaatcctaactggggctggagctggatggaacgctggatgacagcaagaccttgggagagccgattggcagcatcagacaaggataataaagagcgttctctgacaaagaattccagcagcagtgctgttcgaatgtctgtaccccgtgccatctcaatccagaggccagcaacaccaaacaagtcaagccgtccaccaagccggcagtcaccttcaacaccgccatcgaaggcaccatctacctcaggaaagaccaggccggcaagtccaaggggcagctggctgtacaaggaagatgacctgaggagcatcacaagcatacgctctgaacgcccaaggaggcaaagcataggcggaggctcggtccgggatgatgcaagcctgactagcacaccacctctccccagttatatgcagtcgacagagtctgcgagggcaaagtctcgataccgcagcttgttgactgaaaagcttgaggtttcagagagggcacctctggcccattcggttgttaagaagcgcctctccttccctgtcatcgacaaaccgagcagtccaccggcagataagacaaaggaaagagcgaggcgccattcagaccctccgaaggttgatcctgcaatgatgaaggatgcccctgttgcctgatcaggcccttgtgattgttaggtttcgtgctgttttaactccatgatgtattttctaagttagattgttttctctgcgtaatgtctaatctgtccgggttgatttgagaattgaggcaattctaactgtatttgctgtcatggttttctccctgtagattgatacgtgtgattctaatagtgtatgcccttggctttcaatgtacgatataacggtttttgacagactttcttaacgtgcgaaattgcaatatatatatatatatatatccattcc

SEQ ID NO: 1184 - protein, 498 aa, Panicum virgatum
  misc_feature: Ceres Clone ID no. 1998974
  misc_feature (1)..(498): Bit score of 576.8 for hmm based on sequences of FIGURE 16.
  misc_feature (139)..(159): Pfam Name: IQ Pfam Description: IQ calmodulin-binding motif
  misc_feature: Functional Homolog Of SEQ ID NO. 922
MGKKGKWFSAVKKVFGSSDPDGKEAKVEKADKSKSRRRWPFGKSRHSDPSTSMVSGTAPVAPLPPPPPIQLTQPHSQEIKDVKPVETDSEQNKHAYSVALASAVAAEAAAVAAQAAAEVVRLTAVTTAAPKMPVTSREELAAIKIQTAFRGYLARRALRALRGLVRLKSLVDGNAVKRQTSHTLHCTQTMTRVQTQIYSRRVKLEEEKQALQRQLQLKHQRELEKMKIEEDWDHSHQSKEQIEASLVMKQEAALKRERALAYAFSHQWRNSGRTITPTFTEPGNPNWGWSWMERWMTARPWESRLAASDKDNKERSLTKNSSSSAVRMSVPRAISIQRPATPNKSSRPPSRQSPSTPPSKAPSTSGKTRPASPRGSWLYKEDDLRSITSIRSERPRRQSIGGGSVRDDASLTSTPPLPSYMQSTESARAKSRYRSLLTEKLEVSERAPLAHSVVKKRLSFPVIDKPSSPPADKTKERARRHSDPPKVDPAMMKDAPVA

SEQ ID NO: 1185 - DNA, 1812 bp, Panicum virgatum
  misc_feature: Ceres Clone ID no. 1747444
  misc_feature: Encodes the peptide sequence at SEQ ID NO. 1186
agaggtccgtgcggtgggcggtggcttaccagagttaggtccttggcgccttcagtcgggtgaggaaggcttgcagccgagacattgaagacacagtaatagaacacaaaagaatgggtaagaagggaaagtggtttagtgctgtgaagaaagtcttcggctcctccgatcctgatggaaagcaagcaaaggctgagaaggcggacaagtcaaaatccagtaggagatggccatttggaaagtcgaggcactctgatccttctgcctcaacggtgtcagggactgctccagtagctcctttgccgccgccgccaccaatacaacttactcagccacactctcaggagattaaagatgtcaagccagttgaaacagacagtgagcagaacaagcatgcatactctgttgcccttgcatctgctgttgctgctgaagctgcagcagttgctgcccaggccgctgctgaggttgtccgcctcacagcagttactacggcagcaccaaaaatgcctgttacttcaagggaagaacttgcggccatcaagattcagaccgccttcagaggttatctggcaaggagagcattgcgcgcactaagagggctagttagattgaagtcacttgttgatggacatgccgtcaagcgccaaactgctcatactttgcattgcacacaaacgatgacaagagttcaagctcaaatctactctagaagggtgaaattggaggaggaaaaacaggctcttcaaaggcagctccaattgaaacatcaaagggaacttaagaaaatgaagattgatgaagactgggatcacagccatcaatccaaagaacaaattgaggccagcctagttatgaaacaagaagctgcgctaagacgagaaagagcactcgcatatgctttttctcatcagtggagaaattctggtcgaactataaccccaactttcacagaacctggtaatcctaactggggctggagctggatggaacgctggatgacagcaagaccttgggagagccgattggcagcatcagacaaggatcctaaagagcgttctctgacaaagaattccagcaccagtgctgttcgaatgtctgtaccccgtgccatctcaatccagaggccagcaacaccaaacaagtcaagccgtccaccaagccggcaatcaccttcaacaccgccatcgaaggcaccatctacctcaggaaagaccaggccggcaagtccaaggagcagctggctgtacaaggaagatgacctgaggagcatcacaagcatacgctctgaacgcccaaggaggcaaagcataggtggaggctcggtccgggatgatgcaagcctgactagcacaccacctctccccagttatatgcagtcgacagagtctgcgagagcaaagtctcgataccgcagcttattgactgagaaacttgagctttcagagagggcacctctggcccattcagttgttaagaagcgcctctccttcccagtcattgacaaaccgagcggtccaccggcagataagccaaaggaaagggtgagacgccattcagaccctccgaaagtcgatccggcaacactgaaggatgctcctgttgcctgatcaggcccttgtgattgttaggtttcatgctgttttaactccatgatgaaatttctaagattgttttctctgtgtaatgtatgatctgtccgggttgatttgagaattgagacaattctaactgtgtttgcagacatggttttctccctgtagattgacacgtgtgatgctaacagtgtgtgctgttggctttcaatgtacc

SEQ ID NO: 1186 - protein, 498 aa, Panicum virgatum
  misc_feature: Ceres Clone ID no. 1747444
  misc_feature (1)..(498): Bit score of 572.6 for hmm based on sequences of FIGURE 16.
  misc_feature (139)..(159): Pfam Name: IQ Pfam Description: IQ calmodulin-binding motif
  misc_feature: Functional Homolog Of SEQ ID NO. 922
MGKKGKWFSAVKKVFGSSDPDGKQAKAEKADKSKSSRRWPFGKSRHSDPSASTVSGTAPVAPLPPPPPIQLTQPHSQEIKDVKPVETDSEQNKHAYSVALASAVAAEAAAVAAQAAAEVVRLTAVTTAAPKMPVTSREELAAIKIQTAFRGYLARRALRALRGLVRLKSLVDGHAVKRQTAHTLHCTQTMTRVQAQIYSRRVKLEEEKQALQRQLQLKHQRELKKMKIDEDWDHSHQSKEQIEASLVMKQEAALRRERALAYAFSHQWRNSGRTITPTFTEPGNPNWGWSWMERWMTARPWESRLAASDKDPKERSLTKNSSTSAVRMSVPRAISIQRPATPNKSSRPPSRQSPSTPPSKAPSTSGKTRPASPRSSWLYKEDDLRSITSIRSERPRRQSIGGGSVRDDASLTSTPPLPSYMQSTESARAKSRYRSLLTEKLELSERAPLAHSVVKKRLSFPVIDKPSGPPADKPKERVRRHSDPPKVDPATLKDAPVA

SEQ ID NO: 1187 - protein, 498 aa, Zea mays
  misc_feature: Public GI ID no. 194702278
  misc_feature (1)..(498): Bit score of 556.4 for hmm based on sequences of FIGURE 16.
  misc_feature (137)..(157): Pfam Name: IQ Pfam Description: IQ calmodulin-binding motif
  misc_feature: Functional Homolog Of SEQ ID NO. 922
MGKRGKWFSAVKKVFSSSDPDGKEAKAQKADKSKSKRRWPFGKSKHSEPSISTVPGTAPAVAPLPSPPATQPHSLEIKDVNPVETDSEQNKHAYSVALASAVAAEAAAVAAQAAAEVVRLTAVTTAAPKMPVSSREELAATKIQTAFRGYLARRALRALRGLVRLKSLVDGNAVKRQTAHTLQCTQAMTRVQTQIYSRRVKLEEEKQALQRQLQLKHQRELEKMKIDEDWDHSHQSKEQIEANLMMKQEAALRRERALAYAFSHQWRNSGRTITPTFTEPGNPNWGWSWMERWMTARPWESRLAAASDKDPKERAVTKNASTSAVRVPVSRAISIQRPATPNKSSRPPSRQSLSTPPSKTPSASGKARPASPRNSWLYKEDDLRSITSIRSERPRRQSTGGGSVRDDTSLTSTPPLPSYMQSTESARAKSRYRSLLLTEKLEVPERAPLAHSVVKKRLSFPVVEKPSVVPTEKPRERVRRHSDPPKVDPATLKDAPAA

SEQ ID NO: 1188 - protein, 499 aa, Picea sitchensis
  misc_feature: Public GI ID no. 116787496
  misc_feature (1)..(499): Bit score of 318.9 for hmm based on sequences of FIGURE 16.
  misc_feature (120)..(140): Pfam Name: IQ Pfam Description: IQ calmodulin-binding motif
  misc_feature: Functional Homolog Of SEQ ID NO. 922
MDKKGSCFSVLKWAFCAKQKSHATKQGKKKGGCCFGSFRHHEPAAPKEDTRVKKTLGEGQEIRNEHEKPLVEVKEEQNSHASAVAVATAAAAEAAAAAAHAVAKVVRLTESYYSTNSPEECAAIKIQTAFRGYLVRRNFHTLRGLMRLQALVQGQSVRRQATNTMRCMQALVRVHSQICSRRIRMFEENQALQHHLQQKYEKELENRTSNSEADHQQDWESSLLTKEEIEARLQSKIEAAIKRERALAYAFSHHLWKNPPKSVQTMLMEIDPDKPHWGWSWLERWMATRPWDNHRMTMKENSTRKLQTIGEIGQKTSHIGLKQHNAEVTNIGTIKSDPFTPLSKPSIPNKMPLTGTDIKSDVNVLRSERPRYSSRYGVAGTSSLRDDESLMSSPRIPNYMASTESAKAKVRSQSTPKQRPGTPDTEPTSYRRKRLSFPLSEASSGPYRSTKGSMFPHTSPSLKGISGTSKSKKSVSSLRDLSIESDNSSLNWGHRKPFR

SEQ ID NO: 1189 - DNA, 609 bp, Sorghum bicolor
  misc_feature: Ceres Annot ID no. 8680317
  misc_feature: Encodes the peptide sequence at SEQ ID NO. 1190
atggcagagacggtgttcaccccatctttggaagggatgaagcatgtcaaggcagagaacggagtcattctcaccaagcccttccttgatgtctgcaagcaaatcttgcctgtcctcgataaatttggagctgctatggcaattgtaaagactgatatcggtggcaatatcacaagactggaaaacaagtattgttcagatccatcaaagtatgaacatttgtacaccatggctcaggaagaagttcaaaacaagaccgcaaaaggttcctcaagctgcacaaatgggcttctgtggctcacgagggccatggatttccttgtcgagttgtttcgtaacctgcttgagcatccagattggaccatgagtcaagcttgcactgattcatacaccaagactctgaagaaatttcatggctggcttgccagttctagttttacggtggccatgaagcttgctcccaatagagataaatttatggaggtcattagtggaactggtgacatcaatgcagatattgagaaattttgcacaaccttctcacctttcctcaaagaaaatcacaactttctggcgagcgtcggtcttgatgatatgaaggcttcatag

SEQ ID NO: 1190 - protein, 202 aa, Sorghum bicolor
  misc_feature: Ceres Annot ID no. 8680317
  misc_feature (1)..(202): Bit score of 553.8 for hmm based on sequences of FIGURE 13.
  misc_feature (10)..(198): Pfam Name: GLTP Pfam Description: Glycolipid transfer protein (GLTP)
  misc_feature: Functional Homolog Of SEQ ID NO. 697
MAETVFTPSLEGMKHVKAENGVILTKPFLDVCKQILPVLDKFGAAMAIVKTDIGGNITRLENKYCSDPSKYEHLYTMAQEEVQNKTAKGSSSCTNGLLWLTRAMDFLVELFRNLLEHPDWTMSQACTDSYTKTLKKFHGWLASSSFTVAMKLAPNRDKFMEVISGTGDINADIEKFCTTFSPFLKENHNFLASVGLDDMKAS

SEQ ID NO: 1191 - DNA, 609 bp, Sorghum bicolor
  misc_feature: Ceres Annot ID no. 8735098
  misc_feature: Encodes the peptide sequence at SEQ ID NO. 1192
atggcagagacggtgttcaccccctctctggaagggatgaagcatgtcaaggcagagaacggagtcattctcaccaagcccttccttgatgtctgcaagcaaatcctgcctgtcctggataaatttggagctgctatggcacttgtaaaaactgatatcggtggcaatatcacaagactggaaacaaagtattcttcagatccatcaaagtatgaacacttgtacagcatggttcaggaagaagttcaaaacaagacagcaaaaggttcctcaagctgcacaaatgggcttctgtggctcacgagggccatggatttccttgttgagttgtttcgtaaccttcttgagcatgcagactggaccatgactcaagcttgcactgattcatacaccaagactctgaagaaatttcatggctggcttgccagttctagttttacggtggccatgcggctcgctcctaatagagataaatttatggaggtcattagtggaactggtgacatcaatgcagatattgagaaattttgcacaaccttctctcctttcctcaaagaaaatcatgaatttctggcgagcgttggtcttgatgacatgaaggcttcatag

SEQ ID NO: 1192 - protein, 202 aa, Sorghum bicolor
  misc_feature: Ceres Annot ID no. 8735098
  misc_feature (1)..(202): Bit score of 554.2 for hmm based on sequences of FIGURE 13.
  misc_feature (10)..(198): Pfam Name: GLTP Pfam Description: Glycolipid transfer protein (GLTP)
  misc_feature: Functional Homolog Of SEQ ID NO. 697
MAETVFTPSLEGMKHVKAENGVILTKPFLDVCKQILPVLDKFGAAMALVKTDIGGNITRLETKYSSDPSKYEHLYSMVQEEVQNKTAKGSSSCTNGLLWLTRAMDFLVELFRNLLEHADWTMTQACTDSYTKTLKKFHGWLASSSFTVAMRLAPNRDKFMEVISGTGDINADIEKFCTTFSPFLKENHEFLASVGLDDMKAS

SEQ ID NO: 1193 - protein, 202 aa, Vitis vinifera
  misc_feature: Public GI ID no. 157336747
  misc_feature (1)..(202): Bit score of 512.6 for hmm based on sequences of FIGURE 13.
  misc_feature (10)..(198): Pfam Name: GLTP Pfam Description: Glycolipid transfer protein (GLTP)
  misc_feature: Functional Homolog Of SEQ ID NO. 697
MEGSVFTPSLEGMKHVKSETGEMLTKPFLDVCKLILPVIDKFGAAMALVKSDIGGNISRLEDKYSSNPTEFNLLYSMVEVEVAAKTAKGSSSCTNGLLWLTRAMEFLVELFHNLLQHPDWTMSQVCTDSYGKTLKQWHGWLASSSFSLAMKLAPDRKKFMDVISGTGDVNADMEAFCTSFSPFLEENHKFLASKGLDNLKAS

SEQ ID NO: 1194 - protein, 244 aa, Vitis vinifera
  misc_feature: Public GI ID no. 157335039
  misc_feature (1)..(244): Bit score of 156.2 for hmm based on sequences of FIGURE 13.
  misc_feature (26)..(216): Pfam Name: GLTP Pfam Description: Glycolipid transfer protein (GLTP)
  misc_feature: Functional Homolog Of SEQ ID NO. 697
MEKGSEIRSAIEELSMVVKVKTGEDHDAAVHVPHDTAHIPTGPFLSVCNSIRLVLDKIGPTMAVLRQDVHQNIQRLEMAHESNPSKYSNFVEMLKKEVNEGNARKGASCCKAFVWLTRSMDFMAALLQRLAKDPRQSMEQAVEESYSIALKPWHGWISSAAFKVALKLVPDDKTFITLLLAKDENLDTLQEEMQALTSLLVPFLEEIHSILVSLHSCCLTTCLTWYITHLFLLLSNSAGIIRLG

SEQ ID NO: 1195 - protein, 204 aa, Physcomitrella patens subsp. patens
  misc_feature: Public GI ID no. 168030784
  misc_feature (1)..(204): Bit score of 397.0 for hmm based on sequences of FIGURE 13.
  misc_feature (13)..(200): Pfam Name: GLTP Pfam Description: Glycolipid transfer protein (GLTP)
  misc_feature: Functional Homolog Of SEQ ID NO. 697
MAEQTVTVFGPALELMKSVKSPEGEMLTKPFLDVCRNVLPVIDKFGSSMALVKSDVGGNISRLDAKYDSDPSANSLLYDIVRAEVAAKTAKGSSSCSNGMLWLTRAMDFLVELFRNLNDHSDWTMSQCATAAYTSTLKKYHGWIASTAFTVAMKLVPERSKFYETLALGNSTADMERFVTEFSPILAENHEFLKSVNLDDLKAS

1. A method of producing a plant having increased tolerance to salinity and/or increased tolerance to oxidative stress, said method comprising growing a plant cell comprising an exogenous nucleic acid, said exogenous nucleic acid comprising a regulatory region operably linked to a nucleotide sequence encoding a polypeptide, wherein the HMM bit score of the amino acid sequence of said polypeptide is greater than about 15, said HMM based on the amino acid sequences depicted in one of FIGS. 1 to 16, and wherein said plant has a difference in the level of salinity and/or oxidative stress tolerance as compared to the corresponding level of salinity and/or oxidative stress tolerance of a control plant that does not comprise said nucleic acid.

2. The method of claim 1, wherein the HMM bit score is greater than about 250 and wherein the polypeptide comprises XYPPX repeat domains.

3. The method of claim 1, wherein the HMM bit score is greater than about 65 based on the amino acid sequences depicted in FIG. 3 and wherein the polypeptide comprises an Cystatin domain having 70% percent or greater sequence identity to the Cystatin domain of any one of SEQ ID NO: 102, 103, 104, 106, 108, 110, 112, 114, 115, 116, 117, 118, 119, 120, 122, 124, 125, 127, 128, 129, 130, 132, 134, or 136.

4. The method of claim 1, wherein the HMM bit score is greater than about 175 based on the amino acid sequences depicted in FIG. 4 and wherein the polypeptide comprises an KOW domain having 70% percent or greater sequence identity to the KOW domain of any one of SEQ ID NO: 32, 33, 35, 37, 38, 40, 42, 44, 46, 48, 49, 51, 53, 54, 56, 58, 60, 62, 63, 64, 65, 66, 67, 68, 69, 71, 73, 75, 77, 79, 81, 83, 85, 87, 89, 91, 93, 95, 97, 98, 99, or 100 and wherein the polypeptide comprises an Ribosomal L27e protein family domain having 70% percent or greater sequence identity to the Ribosomal L27e protein family domain of any one of said SEQ ID NOs.

5. The method of claim 1, wherein the HMM bit score is greater than about 1095 based on the amino acid sequences depicted in FIG. 5 and wherein the polypeptide comprises an Glycosyl transferases group 1 domain having 70% percent or greater sequence identity to the Glycosyl transferases group 1 domain of any one of SEQ ID NO: 138, 140, 142, 144, 146, or 147, and wherein the polypeptide comprises an PIGA domain having 70% percent or greater sequence identity to the PIGA domain of any one of said SEQ ID NOs.

6. The method of claim 1, wherein the HMM bit score is greater than about 535 based on the amino acid sequences depicted in FIG. 6 and wherein the polypeptide comprises an GRAS domain having 70% percent or greater sequence identity to the GRAS domain of any one of SEQ ID NO: 149, 151, 153, 154, 155, 157, 159, 161, 162, 163, 164, 165, 167, or 169.

7. The method of claim 1, wherein the HMM bit score is greater than about 120 based on the amino acid sequences depicted in FIG. 7 and wherein the polypeptide comprises an Cytochrome P450 domain having 70% percent or greater sequence identity to the Cytochrome P450 domain of any one of SEQ ID NO: 441, 442, 444, 445, 446, 447, 449, 450, 451, 452, 453, 454, 456, 457, 458, 459, 460, 461, 462, 463, 464, 465, 467, 468, 469, 470, 471, 472, 473, 474, 475, 477, 479, 480, 481, 482, 484, 486, 487, 489, 490, 491, 492, 493, 494, 496, 498, 500, 502, 503, 504, 505, 506, 507, 508, 509, 511, 512, 513, 514, 516, 517, 518, 519, 520, 522, 523, 524, 525, 527, 529, 531, 532, 533, 534, 536, 537, 538, 539, 540, 541, 543, 544, 546, 547, 549, 550, 551, 552, 553, 555, 556, 557, 559, 560, 562, 563, 564, 565, 566, 567, 569, 571, 572, 574, 576, 577, 578, 580, 582, 583, 585, 586, 588, 590, 591, 592, 593, 594, 595, 597, 598, 600, 601, 603, 605, 606, 608, 609, 610, 611, 613, 614, 615, 616, 617, 618, 620, 622, 624, 625, 626, 627, 629, 631, 633, 635, 637, 639, 640, 641, 642, 643, 644, 646, 648, 650, 651, 653, 654, 655, 657, 659, 660, 661, 662, 663, 664, 665, 666, 668, 669, 671, 673, 675, 677, 678, 680, 682, 684, 686, 688, or 690.

8. The method of claim 1, wherein the HMM bit score is greater than about 180 based on the amino acid sequences depicted in FIG. 9 and wherein the polypeptide comprises an Cyclin, N-terminal domain having 70% percent or greater sequence identity to the Cyclin, N-terminal domain of any one of SEQ ID NO: 764, 765, 766, 767, 769, 770, 771, 773, 774, 775, 776, 777, 779, 780, 781, 782, 784, 785, 786, 788, 790, 792, 793, 795, 796, 797, 798, 801, 802, 804, 805, 808, 809, 810, 812, 813, 814, 815, 816, 817, 818, 819, 820, 822, 824, 825, 826, 827, 829, 832, 834, 836, 838, 840, 841, 843, 845, 846, 847, 848, 849, 850, 851, 852, 854, 855, 856, 857, 858, 860, 861, 862, 863, 864, 867, 870, 871, 872, 874, 876, 878, 880, 882, 884, 886, 888, or 890, and wherein the polypeptide comprises an Cyclin, C-terminal domain having 70% percent or greater sequence identity to the Cyclin, C-terminal domain of any one of said SEQ ID NOs.

9. The method of claim 1, wherein the HMM bit score is greater than about 110 based on the amino acid sequences depicted in FIG. 10 and wherein the polypeptide comprises an MATH domain having 70% percent or greater sequence identity to the MATH domain of any one of SEQ ID NO: 389, 392, 394, 396, 398, 400, 401, 402, 403, 405, 406, 407, 408, 410, 411, 412, 414, 416, 417, 418, 419, 421, 422, 424, 426, 428, 430, 431, 432, 433, 434, 436, 437, or 438.

10. The method of claim 1, wherein the HMM bit score is greater than about 75 based on the amino acid sequences depicted in FIG. 11 and wherein the polypeptide comprises an LSD1 zinc finger domain having 70% percent or greater sequence identity to the LSD1 zinc finger domain of any one of SEQ ID NO: 316, 318, 319, 320, 321, 323, 324, 331, 333, 335, 337, 339, 340, 344, 346, 348, 350, 351, 353, 355, 356, 357, 359, 361, 363, 365, 367, 369, 374, 375, 377, 378, 380, 382, 384, or 386.

11. The method of claim 1, wherein the HMM bit score is greater than about 50 based on the amino acid sequences depicted in FIG. 14 and wherein the polypeptide comprises an LSD1 zinc finger domain having 70% percent or greater sequence identity to the LSD1 zinc finger domain of any one of SEQ ID NO: 239, 241, 243, 245, 247, 249, 250, 251, 253, 255, 257, 259, 261, 262, 264, 266, 270, 271, 272, 273, 275, 279, 281, 282, 284, 286, 288, 290, 291, 292, 293, 294, 295, 297, 299, 301, 302, 304, 306, or 308.

12. The method of claim 1, wherein the HMM bit score is greater than about 70 based on the amino acid sequences depicted in FIG. 13 and wherein the polypeptide comprises an GLTP domain having 70% percent or greater sequence identity to the GLTP domain of any one of SEQ ID NO: 697, 699, 703, 706, 707, 709, 711, 712, 714, 718, 720, 722, 723, 726, 728, 730, 732, 733, 735, 737, 739, 740, 741, 742, 743, 745, 746, 747, 749, 751, 752, 753, 755, 757, 759, or 761.

13. The method of claim 1, wherein the HMM bit score is greater than about 25 based on the amino acid sequences depicted in FIG. 16 and wherein the polypeptide comprises an IQ calmodulin-binding motif domain having 70% percent or greater sequence identity to the IQ calmodulin-binding motif domain of any one of SEQ ID NO: 724, 806, 831, 866, 868, 869, 899, 922, 924, 926, 928, 930, 932, 934, 936, 938, 940, 942, 944, 946, 948, 950, 952, 954, 956, 958, 960, 962, 964, 966, 968, 970, 972, 974, 975, 976, 977, 978, 979, 981, 982, 983, 985, 987, 989, 991, 993, 994, 995, or 996.

14. A method of producing a plant, said method comprising growing a plant cell comprising an exogenous nucleic acid, said exogenous nucleic acid comprising a regulatory region operably linked to a nucleotide sequence encoding a polypeptide having 80 percent or greater sequence identity to an amino acid sequence selected from the group consisting of SEQ ID NO: 2, 4, 6, 7, 9, 11, 13, 15, 17, 19, 21, 23, 25, 27, 29, 30, 32, 33, 35, 37, 38, 40, 42, 44, 46, 48, 49, 51, 53, 54, 56, 58, 60, 62, 63, 64, 65, 66, 67, 68, 69, 71, 73, 75, 77, 79, 81, 83, 85, 87, 89, 91, 93, 95, 97, 98, 99, 100, 102, 103, 104, 106, 108, 110, 112, 114, 115, 116, 117, 118, 119, 120, 122, 124, 125, 127, 128, 129, 130, 132, 134, 136, 138, 140, 142, 144, 146, 147, 149, 151, 153, 154, 155, 157, 159, 161, 162, 163, 164, 165, 167, 169, 172, 174, 175, 178, 179, 180, 182, 184, 186, 187, 188, 189, 191, 192, 194, 196, 198, 200, 202, 204, 206, 208, 211, 217, 219, 223, 225, 226, 228, 230, 232, 233, 235, 237, 239, 241, 243, 245, 247, 249, 250, 251, 253, 255, 257, 259, 261, 262, 264, 266, 270, 271, 272, 273, 275, 279, 281, 282, 284, 286, 288, 290, 291, 292, 293, 294, 295, 297, 299, 301, 302, 304, 306, 308, 316, 318, 319, 320, 321, 323, 324, 331, 333, 335, 337, 339, 340, 344, 346, 348, 350, 351, 353, 355, 356, 357, 359, 361, 363, 365, 367, 369, 374, 375, 377, 378, 380, 382, 384, 386, 389, 392, 394, 396, 398, 400, 401, 402, 403, 405, 406, 407, 408, 410, 411, 412, 414, 416, 417, 418, 419, 421, 422, 424, 426, 428, 430, 431, 432, 433, 434, 436, 437, 438, 441, 442, 444, 445, 446, 447, 449, 450, 451, 452, 453, 454, 456, 457, 458, 459, 460, 461, 462, 463, 464, 465, 467, 468, 469, 470, 471, 472, 473, 474, 475, 477, 479, 480, 481, 482, 484, 486, 487, 489, 490, 491, 492, 493, 494, 496, 498, 500, 502, 503, 504, 505, 506, 507, 508, 509, 511, 512, 513, 514, 516, 517, 518, 519, 520, 522, 523, 524, 525, 527, 529, 531, 532, 533, 534, 536, 537, 538, 539, 540, 541, 543, 544, 546, 547, 549, 550, 551, 552, 553, 555, 556, 557, 559, 560, 562, 563, 564, 565, 566, 567, 569, 571, 572, 574, 576, 577, 578, 580, 582, 583, 585, 586, 588, 590, 591, 592, 593, 594, 595, 597, 598, 600, 601, 603, 605, 606, 608, 609, 610, 611, 613, 614, 615, 616, 617, 618, 620, 622, 624, 625, 626, 627, 629, 631, 633, 635, 637, 639, 640, 641, 642, 643, 644, 646, 648, 650, 651, 653, 654, 655, 657, 659, 660, 661, 662, 663, 664, 665, 666, 668, 669, 671, 673, 675, 677, 678, 680, 682, 684, 686, 688, 690, 693, 694, 697, 699, 703, 706, 707, 709, 711, 712, 714, 718, 720, 722, 723, 724, 726, 728, 730, 732, 733, 735, 737, 739, 740, 741, 742, 743, 745, 746, 747, 749, 751, 752, 753, 755, 757, 759, 761, 764, 765, 766, 767, 769, 770, 771, 773, 774, 775, 776, 777, 779, 780, 781, 782, 784, 785, 786, 788, 790, 792, 793, 795, 796, 797, 798, 801, 802, 804, 805, 808, 809, 810, 812, 813, 814, 815, 816, 817, 818, 819, 820, 822, 824, 825, 826, 827, 829, 831, 832, 832, 834, 836, 838, 840, 841, 843, 845, 846, 847, 848, 849, 850, 851, 852, 854, 855, 856, 857, 858, 860, 861, 862, 863, 864, 867, 867, 868, 869, 870, 871, 872, 874, 876, 878, 880, 882, 884, 886, 888, 890, 892, 894, 896, 898, 899, 901, 903, 905, 906, 907, 909, 911, 913, 914, 915, 916, 918, 920, 922, 924, 926, 928, 930, 932, 934, 936, 938, 940, 942, 944, 946, 948, 950, 952, 954, 956, 958, 960, 962, 964, 966, 968, 970, 972, 974, 975, 976, 977, 978, 979, 981, 982, 983, 985, 987, 989, 991, 993, 994, 995, and 996, wherein a plant produced from said plant cell has a difference in the level of salinity and/or oxidative stress tolerance as compared to the corresponding level of salinity and/or oxidative stress tolerance of a control plant that does not comprise said nucleic acid.

15. The method of claim 14, wherein the HMM bit score of the amino acid sequence of said polypeptide is greater than about 15, said HMM based on the amino acid sequences depicted in any one of FIGS. 1 to 16.

16. A method of producing a plant, said method comprising growing a plant cell comprising an exogenous nucleic acid, said exogenous nucleic acid comprising a regulatory region operably linked to a nucleotide sequence having 80 percent or greater sequence identity to a fragment of a nucleotide sequence selected from the group consisting of SEQ ID NO: 1, 3, 5, 8, 10, 12, 14, 16, 18, 20, 22, 24, 26, 28, 31, 34, 36, 39, 41, 43, 45, 47, 50, 52, 55, 7, 59, 61, 70, 72, 74, 76, 78, 80, 82, 84, 86, 88, 90, 92, 94, 96, 101, 105, 107, 109, 111, 113, 121, 123, 126, 131, 133, 135, 137, 139, 141, 145, 148, 150, 152, 156, 158, 160, 166, 168, 170, 171, 173, 177, 181, 183, 185, 190, 193, 195, 197, 199, 201, 203, 205, 207, 210, 216, 218, 222, 224, 227, 229, 231, 234, 236, 238, 240, 242, 244, 246, 248, 252, 254, 256, 258, 260, 263, 265, 269, 274, 278, 280, 283, 285, 287, 289, 296, 298, 300, 303, 305, 307, 315, 317, 322, 330, 332, 334, 336, 338, 343, 345, 347, 349, 352, 354, 358, 360, 362, 364, 366, 368, 376, 379, 381, 383, 385, 387, 388, 391, 393, 395, 397, 399, 404, 409, 413, 415, 420, 423, 425, 427, 429, 435, 439, 440, 443, 448, 455, 466, 476, 478, 483, 485, 488, 495, 497, 499, 501, 510, 515, 521, 526, 528, 530, 535, 542, 545, 548, 554, 558, 561, 568, 570, 573, 575, 579, 581, 584, 587, 589, 596, 599, 602, 604, 607, 612, 619, 621, 623, 628, 630, 632, 634, 636, 638, 645, 647, 649, 652, 656, 658, 667, 670, 672, 674, 676, 679, 681, 683, 685, 687, 689, 691, 692, 695, 696, 698, 702, 708, 710, 713, 717, 719, 721, 725, 727, 729, 731, 734, 736, 738, 744, 748, 750, 754, 756, 758, 760, 762, 763, 768, 772, 778, 783, 787, 789, 791, 794, 799, 800, 803, 807, 811, 821, 823, 828, 830, 833, 835, 837, 839, 842, 844, 853, 859, 865, 873, 875, 877, 879, 881, 883, 885, 887, 889, 891, 893, 895, 897, 900, 902, 904, 908, 910, 912, 917, 919, 921, 923, 925, 927, 929, 931, 933, 935, 937, 939, 941, 943, 945, 947, 949, 951, 953, 955, 957, 959, 961, 963, 965, 967, 969, 971, 973, 980, 984, 986, 988, 990, and 992, wherein a plant produced from said plant cell has a difference in the level of salinity and/or oxidative stress tolerance as compared to the corresponding level of salinity and/or oxidative stress tolerance of a control plant that does not comprise said nucleic acid.

17. A method of modulating the level of salinity and/or oxidative stress tolerance in a plant, said method comprising introducing into a plant cell an exogenous nucleic acid, said exogenous nucleic acid comprising a regulatory region operably linked to a nucleotide sequence encoding a polypeptide, wherein the HMM bit score of the amino acid sequence of said polypeptide is greater than about 15, said HMM based on the amino acid sequences depicted in one of FIGS. 1 to 16, and wherein a plant produced from said plant cell has a difference in the level of salinity and/or oxidative stress tolerance as compared to the corresponding level of salinity and/or oxidative stress tolerance of a control plant that does not comprise said exogenous nucleic acid.

18. A method of modulating the level of salinity and/or oxidative stress tolerance in a plant, said method comprising introducing into a plant cell an exogenous nucleic acid, said exogenous nucleic acid comprising a regulatory region operably linked to a nucleotide sequence encoding a polypeptide having 80 percent or greater sequence identity to an amino acid sequence selected from the group consisting of SEQ ID NO: 2, 4, 6, 7, 9, 11, 13, 15, 17, 19, 21, 23, 25, 27, 29, 30, 32, 33, 35, 37, 38, 40, 42, 44, 46, 48, 49, 51, 53, 54, 56, 58, 60, 62, 63, 64, 65, 66, 67, 68, 69, 71, 73, 75, 77, 79, 81, 83, 85, 87, 89, 91, 93, 95, 97, 98, 99, 100, 102, 103, 104, 106, 108, 110, 112, 114, 115, 116, 117, 118, 119, 120, 122, 124, 125, 127, 128, 129, 130, 132, 134, 136, 138, 140, 142, 144, 146, 147, 149, 151, 153, 154, 155, 157, 159, 161, 162, 163, 164, 165, 167, 169, 172, 174, 175, 178, 179, 180, 182, 184, 186, 187, 188, 189, 191, 192, 194, 196, 198, 200, 202, 204, 206, 208, 211, 217, 219, 223, 225, 226, 228, 230, 232, 233, 235, 237, 239, 241, 243, 245, 247, 249, 250, 251, 253, 255, 257, 259, 261, 262, 264, 266, 270, 271, 272, 273, 275, 279, 281, 282, 284, 286, 288, 290, 291, 292, 293, 294, 295, 297, 299, 301, 302, 304, 306, 308, 316, 318, 319, 320, 321, 323, 324, 331, 333, 335, 337, 339, 340, 344, 346, 348, 350, 351, 353, 355, 356, 357, 359, 361, 363, 365, 367, 369, 374, 375, 377, 378, 380, 382, 384, 386, 389, 392, 394, 396, 398, 400, 401, 402, 403, 405, 406, 407, 408, 410, 411, 412, 414, 416, 417, 418, 419, 421, 422, 424, 426, 428, 430, 431, 432, 433, 434, 436, 437, 438, 441, 442, 444, 445, 446, 447, 449, 450, 451, 452, 453, 454, 456, 457, 458, 459, 460, 461, 462, 463, 464, 465, 467, 468, 469, 470, 471, 472, 473, 474, 475, 477, 479, 480, 481, 482, 484, 486, 487, 489, 490, 491, 492, 493, 494, 496, 498, 500, 502, 503, 504, 505, 506, 507, 508, 509, 511, 512, 513, 514, 516, 517, 518, 519, 520, 522, 523, 524, 525, 527, 529, 531, 532, 533, 534, 536, 537, 538, 539, 540, 541, 543, 544, 546, 547, 549, 550, 551, 552, 553, 555, 556, 557, 559, 560, 562, 563, 564, 565, 566, 567, 569, 571, 572, 574, 576, 577, 578, 580, 582, 583, 585, 586, 588, 590, 591, 592, 593, 594, 595, 597, 598, 600, 601, 603, 605, 606, 608, 609, 610, 611, 613, 614, 615, 616, 617, 618, 620, 622, 624, 625, 626, 627, 629, 631, 633, 635, 637, 639, 640, 641, 642, 643, 644, 646, 648, 650, 651, 653, 654, 655, 657, 659, 660, 661, 662, 663, 664, 665, 666, 668, 669, 671, 673, 675, 677, 678, 680, 682, 684, 686, 688, 690, 693, 694, 697, 699, 703, 706, 707, 709, 711, 712, 714, 718, 720, 722, 723, 724, 726, 728, 730, 732, 733, 735, 737, 739, 740, 741, 742, 743, 745, 746, 747, 749, 751, 752, 753, 755, 757, 759, 761, 764, 765, 766, 767, 769, 770, 771, 773, 774, 775, 776, 777, 779, 780, 781, 782, 784, 785, 786, 788, 790, 792, 793, 795, 796, 797, 798, 801, 802, 804, 805, 808, 809, 810, 812, 813, 814, 815, 816, 817, 818, 819, 820, 822, 824, 825, 826, 827, 829, 831, 832, 832, 834, 836, 838, 840, 841, 843, 845, 846, 847, 848, 849, 850, 851, 852, 854, 855, 856, 857, 858, 860, 861, 862, 863, 864, 867, 867, 868, 869, 870, 871, 872, 874, 876, 878, 880, 882, 884, 886, 888, 890, 892, 894, 896, 898, 899, 901, 903, 905, 906, 907, 909, 911, 913, 914, 915, 916, 918, 920, 922, 924, 926, 928, 930, 932, 934, 936, 938, 940, 942, 944, 946, 948, 950, 952, 954, 956, 958, 960, 962, 964, 966, 968, 970, 972, 974, 975, 976, 977, 978, 979, 981, 982, 983, 985, 987, 989, 991, 993, 994, 995, and 996, wherein a plant produced from said plant cell has a difference in the level of salinity and/or oxidative stress tolerance as compared to the corresponding level of salinity and/or oxidative stress tolerance of a control plant that does not comprise said nucleic acid.

19. The method of any one of claims 1, 14, 17 or 18, wherein said polypeptide is selected from the group consisting of SEQ ID NO: 2, 11, 102, 32, 138, 149, 441, 172, 764, 389, 316, 200, 697, 239, 892, 922, and 693.

20. A method of modulating the level of salinity and/or oxidative stress tolerance in a plant, said method comprising introducing into a plant cell an exogenous nucleic acid, said exogenous nucleic acid comprising a regulatory region operably linked to a nucleotide sequence having 80 percent or greater sequence identity to a nucleotide sequence selected from the group consisting of SEQ ID NO: 1, 3, 5, 8, 10, 12, 14, 16, 18, 20, 22, 24, 26, 28, 31, 34, 36, 39, 41, 43, 45, 47, 50, 52, 55, 7, 59, 61, 70, 72, 74, 76, 78, 80, 82, 84, 86, 88, 90, 92, 94, 96, 101, 105, 107, 109, 111, 113, 121, 123, 126, 131, 133, 135, 137, 139, 141, 145, 148, 150, 152, 156, 158, 160, 166, 168, 170, 171, 173, 177, 181, 183, 185, 190, 193, 195, 197, 199, 201, 203, 205, 207, 210, 216, 218, 222, 224, 227, 229, 231, 234, 236, 238, 240, 242, 244, 246, 248, 252, 254, 256, 258, 260, 263, 265, 269, 274, 278, 280, 283, 285, 287, 289, 296, 298, 300, 303, 305, 307, 315, 317, 322, 330, 332, 334, 336, 338, 343, 345, 347, 349, 352, 354, 358, 360, 362, 364, 366, 368, 376, 379, 381, 383, 385, 387, 388, 391, 393, 395, 397, 399, 404, 409, 413, 415, 420, 423, 425, 427, 429, 435, 439, 440, 443, 448, 455, 466, 476, 478, 483, 485, 488, 495, 497, 499, 501, 510, 515, 521, 526, 528, 530, 535, 542, 545, 548, 554, 558, 561, 568, 570, 573, 575, 579, 581, 584, 587, 589, 596, 599, 602, 604, 607, 612, 619, 621, 623, 628, 630, 632, 634, 636, 638, 645, 647, 649, 652, 656, 658, 667, 670, 672, 674, 676, 679, 681, 683, 685, 687, 689, 691, 692, 695, 696, 698, 702, 708, 710, 713, 717, 719, 721, 725, 727, 729, 731, 734, 736, 738, 744, 748, 750, 754, 756, 758, 760, 762, 763, 768, 772, 778, 783, 787, 789, 791, 794, 799, 800, 803, 807, 811, 821, 823, 828, 830, 833, 835, 837, 839, 842, 844, 853, 859, 865, 873, 875, 877, 879, 881, 883, 885, 887, 889, 891, 893, 895, 897, 900, 902, 904, 908, 910, 912, 917, 919, 921, 923, 925, 927, 929, 931, 933, 935, 937, 939, 941, 943, 945, 947, 949, 951, 953, 955, 957, 959, 961, 963, 965, 967, 969, 971, 973, 980, 984, 986, 988, 990, and 992, or a fragment thereof, wherein a plant produced from said plant cell has a difference in the level of salinity and/or oxidative stress tolerance as compared to the corresponding level in of salinity and/or oxidative stress tolerance of a control plant that does not comprise said nucleic acid.

21. A plant cell comprising an exogenous nucleic acid said exogenous nucleic acid comprising a regulatory region operably linked to a nucleotide sequence encoding a polypeptide, wherein the HMM bit score of the amino acid sequence of said polypeptide is greater than about 15, said HMM based on the amino acid sequences depicted in one of FIGS. 1 to 16, and wherein said plant has a difference in the level of salinity and/or oxidative stress tolerance as compared to the corresponding level of salinity and/or oxidative stress tolerance of a control plant that does not comprise said nucleic acid.

22. A plant cell comprising an exogenous nucleic acid said exogenous nucleic acid comprising a regulatory region operably linked to a nucleotide sequence encoding a polypeptide having 80 percent or greater sequence identity to an amino acid sequence selected from the group consisting of SEQ ID NO: 2, 4, 6, 7, 9, 11, 13, 15, 17, 19, 21, 23, 25, 27, 29, 30, 32, 33, 35, 37, 38, 40, 42, 44, 46, 48, 49, 51, 53, 54, 56, 58, 60, 62, 63, 64, 65, 66, 67, 68, 69, 71, 73, 75, 77, 79, 81, 83, 85, 87, 89, 91, 93, 95, 97, 98, 99, 100, 102, 103, 104, 106, 108, 110, 112, 114, 115, 116, 117, 118, 119, 120, 122, 124, 125, 127, 128, 129, 130, 132, 134, 136, 138, 140, 142, 144, 146, 147, 149, 151, 153, 154, 155, 157, 159, 161, 162, 163, 164, 165, 167, 169, 172, 174, 175, 178, 179, 180, 182, 184, 186, 187, 188, 189, 191, 192, 194, 196, 198, 200, 202, 204, 206, 208, 211, 217, 219, 223, 225, 226, 228, 230, 232, 233, 235, 237, 239, 241, 243, 245, 247, 249, 250, 251, 253, 255, 257, 259, 261, 262, 264, 266, 270, 271, 272, 273, 275, 279, 281, 282, 284, 286, 288, 290, 291, 292, 293, 294, 295, 297, 299, 301, 302, 304, 306, 308, 316, 318, 319, 320, 321, 323, 324, 331, 333, 335, 337, 339, 340, 344, 346, 348, 350, 351, 353, 355, 356, 357, 359, 361, 363, 365, 367, 369, 374, 375, 377, 378, 380, 382, 384, 386, 389, 392, 394, 396, 398, 400, 401, 402, 403, 405, 406, 407, 408, 410, 411, 412, 414, 416, 417, 418, 419, 421, 422, 424, 426, 428, 430, 431, 432, 433, 434, 436, 437, 438, 441, 442, 444, 445, 446, 447, 449, 450, 451, 452, 453, 454, 456, 457, 458, 459, 460, 461, 462, 463, 464, 465, 467, 468, 469, 470, 471, 472, 473, 474, 475, 477, 479, 480, 481, 482, 484, 486, 487, 489, 490, 491, 492, 493, 494, 496, 498, 500, 502, 503, 504, 505, 506, 507, 508, 509, 511, 512, 513, 514, 516, 517, 518, 519, 520, 522, 523, 524, 525, 527, 529, 531, 532, 533, 534, 536, 537, 538, 539, 540, 541, 543, 544, 546, 547, 549, 550, 551, 552, 553, 555, 556, 557, 559, 560, 562, 563, 564, 565, 566, 567, 569, 571, 572, 574, 576, 577, 578, 580, 582, 583, 585, 586, 588, 590, 591, 592, 593, 594, 595, 597, 598, 600, 601, 603, 605, 606, 608, 609, 610, 611, 613, 614, 615, 616, 617, 618, 620, 622, 624, 625, 626, 627, 629, 631, 633, 635, 637, 639, 640, 641, 642, 643, 644, 646, 648, 650, 651, 653, 654, 655, 657, 659, 660, 661, 662, 663, 664, 665, 666, 668, 669, 671, 673, 675, 677, 678, 680, 682, 684, 686, 688, 690, 693, 694, 697, 699, 703, 706, 707, 709, 711, 712, 714, 718, 720, 722, 723, 724, 726, 728, 730, 732, 733, 735, 737, 739, 740, 741, 742, 743, 745, 746, 747, 749, 751, 752, 753, 755, 757, 759, 761, 764, 765, 766, 767, 769, 770, 771, 773, 774, 775, 776, 777, 779, 780, 781, 782, 784, 785, 786, 788, 790, 792, 793, 795, 796, 797, 798, 801, 802, 804, 805, 808, 809, 810, 812, 813, 814, 815, 816, 817, 818, 819, 820, 822, 824, 825, 826, 827, 829, 831, 832, 832, 834, 836, 838, 840, 841, 843, 845, 846, 847, 848, 849, 850, 851, 852, 854, 855, 856, 857, 858, 860, 861, 862, 863, 864, 867, 867, 868, 869, 870, 871, 872, 874, 876, 878, 880, 882, 884, 886, 888, 890, 892, 894, 896, 898, 899, 901, 903, 905, 906, 907, 909, 911, 913, 914, 915, 916, 918, 920, 922, 924, 926, 928, 930, 932, 934, 936, 938, 940, 942, 944, 946, 948, 950, 952, 954, 956, 958, 960, 962, 964, 966, 968, 970, 972, 974, 975, 976, 977, 978, 979, 981, 982, 983, 985, 987, 989, 991, 993, 994, 995, and 996, wherein a plant produced from said plant cell has a difference in the level of salinity and/or oxidative stress tolerance as compared to the corresponding level of salinity and/or oxidative stress tolerance of a control plant that does not comprise said nucleic acid.

23. A transgenic plant comprising the plant cell of claim 21 or 22, wherein said polypeptide is selected from the group consisting of SEQ ID NO: 2, 4, 6, 7, 9, 11, 13, 15, 17, 19, 21, 23, 25, 27, 29, 30, 32, 33, 35, 37, 38, 40, 42, 44, 46, 48, 49, 51, 53, 54, 56, 58, 60, 62, 63, 64, 65, 66, 67, 68, 69, 71, 73, 75, 77, 79, 81, 83, 85, 87, 89, 91, 93, 95, 97, 98, 99, 100, 102, 103, 104, 106, 108, 110, 112, 114, 115, 116, 117, 118, 119, 120, 122, 124, 125, 127, 128, 129, 130, 132, 134, 136, 138, 140, 142, 144, 146, 147, 149, 151, 153, 154, 155, 157, 159, 161, 162, 163, 164, 165, 167, 169, 172, 174, 175, 178, 179, 180, 182, 184, 186, 187, 188, 189, 191, 192, 194, 196, 198, 200, 202, 204, 206, 208, 211, 217, 219, 223, 225, 226, 228, 230, 232, 233, 235, 237, 239, 241, 243, 245, 247, 249, 250, 251, 253, 255, 257, 259, 261, 262, 264, 266, 270, 271, 272, 273, 275, 279, 281, 282, 284, 286, 288, 290, 291, 292, 293, 294, 295, 297, 299, 301, 302, 304, 306, 308, 316, 318, 319, 320, 321, 323, 324, 331, 333, 335, 337, 339, 340, 344, 346, 348, 350, 351, 353, 355, 356, 357, 359, 361, 363, 365, 367, 369, 374, 375, 377, 378, 380, 382, 384, 386, 389, 392, 394, 396, 398, 400, 401, 402, 403, 405, 406, 407, 408, 410, 411, 412, 414, 416, 417, 418, 419, 421, 422, 424, 426, 428, 430, 431, 432, 433, 434, 436, 437, 438, 441, 442, 444, 445, 446, 447, 449, 450, 451, 452, 453, 454, 456, 457, 458, 459, 460, 461, 462, 463, 464, 465, 467, 468, 469, 470, 471, 472, 473, 474, 475, 477, 479, 480, 481, 482, 484, 486, 487, 489, 490, 491, 492, 493, 494, 496, 498, 500, 502, 503, 504, 505, 506, 507, 508, 509, 511, 512, 513, 514, 516, 517, 518, 519, 520, 522, 523, 524, 525, 527, 529, 531, 532, 533, 534, 536, 537, 538, 539, 540, 541, 543, 544, 546, 547, 549, 550, 551, 552, 553, 555, 556, 557, 559, 560, 562, 563, 564, 565, 566, 567, 569, 571, 572, 574, 576, 577, 578, 579, 582, 583, 585, 586, 588, 590, 591, 592, 593, 594, 595, 597, 598, 600, 601, 603, 605, 606, 608, 609, 610, 611, 613, 614, 615, 616, 617, 618, 620, 622, 624, 625, 626, 627, 629, 631, 633, 635, 637, 639, 640, 641, 642, 643, 644, 646, 648, 650, 651, 653, 654, 655, 657, 659, 660, 661, 662, 663, 664, 665, 666, 668, 669, 671, 673, 675, 677, 678, 680, 682, 684, 686, 688, 690 693, 694, 697, 699, 703, 706, 707, 709, 711, 712, 714, 718, 720, 722, 723, 724, 726, 728, 730, 732, 733, 735, 737, 739, 740 741, 742, 743, 745, 746, 747, 749, 751, 752, 753, 755, 757, 759, 761, 764, 765, 766, 767, 769, 770, 771, 773, 774, 775, 776, 777, 779, 780, 781, 782, 784, 785, 786, 788, 790, 792, 793, 795, 796, 797, 798, 801, 802, 804, 805, 808, 809, 810, 812, 813, 814, 815, 816, 817, 818, 819, 820, 822, 824, 825, 826, 827, 829, 831, 832, 834, 836 838, 840, 841, 843, 845, 846, 847, 848, 849, 850, 851, 852, 854, 855, 856, 857, 858, 860, 861, 862, 863, 864, 866, 867, 868, 869, 870, 871, 872, 874, 876, 878, 880, 882, 884, 886, 888, 890, 892, 894, 896, 898, 899, 901, 903, 905, 906 907, 909, 911, 913, 914, 915, 916, 918, 920, 922, 924, 926, 928, 930, 932, 934, 936, 938, 940, 942, 944, 946, 948, 950 952, 954, 956, 958, 960, 962, 964, 966, 968, 970, 972, 974, 975, 976, 977, 978, 979, 981, 982, 983, 985, 987, 989, 991, 993, 994, 995, and 996.

24. A plant cell comprising an exogenous nucleic acid said exogenous nucleic acid comprising a regulatory region operably linked to a nucleotide sequence having 80 percent or greater sequence identity to a fragment of a nucleotide sequence selected from the group consisting of SEQ ID NO: 1, 3, 5, 8, 10, 12, 14, 16, 18, 20, 22, 24, 26, 28, 31, 34, 36, 39, 41, 43, 45, 47, 50, 52, 55, 7, 59, 61, 70, 72, 74, 76, 78, 80, 82, 84, 86, 88, 90, 92, 94, 96, 101, 105, 107, 109, 111, 113, 121, 123, 126, 131, 133, 135, 137, 139, 141, 145, 148, 150, 152, 156, 158, 160, 166, 168, 170, 171, 173, 177, 181, 183, 185, 190, 193, 195, 197, 199, 201, 203, 205, 207, 210, 216, 218, 222, 224, 227, 229, 231, 234, 236, 238, 240, 242, 244, 246, 248, 252, 254, 256, 258, 260, 263, 265, 269, 274, 278, 280, 283, 285, 287, 289, 296, 298, 300, 303, 305, 307, 315, 317, 322, 330, 332, 334, 336, 338, 343, 345, 347, 349, 352, 354, 358, 360, 362, 364, 366, 368, 376, 379, 381, 383, 385, 387, 388, 391, 393, 395, 397, 399, 404, 409, 413, 415, 420, 423, 425, 427, 429, 435, 439, 440, 443, 448, 455, 466, 476, 478, 483, 485, 488, 495, 497, 499, 501, 510, 515, 521, 526, 528, 530, 535, 542, 545, 548, 554, 558, 561, 568, 570, 573, 575, 579, 581, 584, 587, 589, 596, 599, 602, 604, 607, 612, 619, 621, 623, 628, 630, 632, 634, 636, 638, 645, 647, 649, 652, 656, 658, 667, 670, 672, 674, 676, 679, 681, 683, 685, 687, 689, 691, 692, 695, 696, 698, 702, 708, 710, 713, 717, 719, 721, 725, 727, 729, 731, 734, 736, 738, 744, 748, 750, 754, 756, 758, 760, 762, 763, 768, 772, 778, 783, 787, 789, 791, 794, 799, 800, 803, 807, 811, 821, 823, 828, 830, 833, 835, 837, 839, 842, 844, 853, 859, 865, 873, 875, 877, 879, 881, 883, 885, 887, 889, 891, 893, 895, 897, 900, 902, 904, 908, 910, 912, 917, 919, 921, 923, 925, 927, 929, 931, 933, 935, 937, 939, 941, 943, 945, 947, 949, 951, 953, 955, 957, 959, 961, 963, 965, 967, 969, 971, 973, 980, 984, 986, 988, 990, and 992, wherein a plant produced from said plant cell has a difference in the level of salinity and/or oxidative stress tolerance as compared to the corresponding level of salinity and/or oxidative stress tolerance of a control plant that does not comprise said nucleic acid.

25. A transgenic plant comprising the plant cell of any one of claim 21, 22 or 24.

26. The transgenic plant of claim 25, wherein said plant is a member of a species selected from the group consisting of Panicum virgatum (switchgrass), Sorghum bicolor (sorghum, sudangrass), Miscanthus giganteus (miscanthus), Saccharum sp. (energycane), Populus balsamifera (poplar), Zea mays (corn), Glycine max (soybean), Brassica napus (canola), Triticum aestivum (wheat), Gossypium hirsutum (cotton), Oryza sativa (rice), Helianthus annuus (sunflower), Medicago sativa (alfalfa), Beta vulgaris (sugarbeet), or Pennisetum glaucum (pearl millet).

27. A seed product comprising embryonic tissue from a transgenic plant according to claim 26.

28. An isolated nucleic acid comprising a nucleotide sequence having 80% or greater sequence identity to the nucleotide sequence set forth in SEQ ID NO: 10, 12, 14, 16, 18, 20, 22, 24, 26, 28, 31, 34, 36, 39, 41, 43, 45, 52, 55, 57, 59, 61, 70, 72, 74, 76, 78, 80, 82, 84, 86, 88, 90, 92, 94, 96, 101, 105, 107, 109, 113, 121, 123, 126, 131, 133, 135, 139, 141, 145, 150, 152, 156, 158, 160, 166, 168, 170, 171, 173, 177, 181, 183, 185, 190, 193, 195, 197, 201, 203, 205, 207, 216, 218, 222, 224, 227, 229, 231, 234, 236, 240, 242, 244, 246, 248, 252, 254, 258, 260, 263, 265, 269, 274, 278, 280, 283, 285, 287, 289, 296, 298, 300, 303, 305, 307, 317, 322, 332, 334, 336, 338, 343, 345, 347, 349, 352, 354, 360, 362, 364, 366, 368, 376, 381, 383, 385, 391, 393, 397, 399, 404, 413, 415, 423, 425, 427, 429, 435, 443, 448, 455, 466, 476, 478, 483, 485, 495, 497, 499, 501, 510, 515, 521, 526, 528, 530, 535, 542, 545, 548, 554, 558, 561, 568, 570, 573, 575, 580, 581, 584, 587, 589, 596, 599, 602, 604, 607, 612, 619, 623, 630, 633, 634, 636, 638, 645, 647, 649, 652, 656, 658, 667, 670, 672, 674, 676, 679, 681, 683, 685, 687, 689, 691, 695, 698, 702, 708, 710, 713, 717, 719, 721, 729, 731, 734, 736, 738, 744, 748, 750, 754, 756, 758, 760, 768, 772, 778, 783, 787, 789, 791, 794, 799, 803, 811, 821, 823, 828, 830, 833, 835, 837, 839, 842, 844, 853, 859, 865, 873, 875, 877, 879, 881, 883, 885, 887, 889, 893, 895, 897, 900, 902, 904, 909, 910, 912, 917, 919, 921, 923, 925, 927, 933, 935, 937, 939, 941, 943, 945, 947, 949, 951, 953, 955, 957, 959, 961, 963, 965, 967, 969, 971, 973, 980, 984, 986, 988, 990, or 992.

29. An isolated nucleic acid comprising a nucleotide sequence encoding a polypeptide having 80% or greater sequence identity to the amino acid sequence set forth in SEQ ID NO: 11, 13, 15, 17, 19, 21, 23, 25, 27, 29, 32, 35, 37, 40, 42, 44, 46, 53, 56, 58, 60, 62, 71, 73, 75, 77, 79, 81, 83, 85, 87, 89, 91, 93, 95, 97, 102, 106, 108, 110, 114, 122, 124, 127, 132, 134, 136, 140, 142, 146, 151, 153, 157, 159, 161, 167, 169, 172, 174, 178, 182, 184, 186, 191, 194, 196, 198, 202, 204, 206, 208, 217, 219, 223, 225, 228, 230, 232, 235, 237, 241, 243, 245, 247, 249, 253, 255, 259, 261, 264, 266, 270, 275, 279, 281, 284, 286, 288, 290, 297, 299, 301, 304, 306, 308, 318, 323, 333, 335, 337, 339, 344, 346, 348, 350, 353, 355, 361, 363, 365, 367, 369, 377, 382, 384, 386, 392, 394, 398, 400, 405, 414, 416, 424, 426, 428, 430, 436, 444, 449, 456, 467, 477, 479, 484, 486, 496, 498, 500, 502, 511, 516, 522, 527, 529, 531, 536, 543, 546, 549, 555, 559, 562, 569, 571, 574, 576, 580, 582, 585, 588, 590, 597, 600, 603, 605, 608, 613, 620, 624, 631, 634, 635, 637, 639, 646, 648, 650, 653, 657, 659, 668, 671, 673, 675, 677, 680, 682, 684, 686, 688, 690, 692, 696, 699, 703, 709, 711, 714, 718, 720, 722, 730, 732, 735, 737, 739, 745, 749, 751, 755, 757, 759, 761, 769, 773, 779, 784, 788, 790, 792, 795, 800, 804, 812, 822, 824, 829, 831, 834, 836, 838, 840, 843, 845, 854, 860, 866, 874, 876, 878, 880, 882, 884, 886, 888, 890, 894, 896, 898, 901, 903, 905, 910, 911, 913, 918, 920, 922, 924, 926, 928, 934, 936, 938, 940, 942, 944, 946, 948, 950, 952, 954, 956, 958, 960, 962, 964, 966, 968, 970, 972, 974, 981, 985, 987, 989, 991, or 993.

30. A method of identifying whether a polymorphism is associated with variation in a trait, said method comprising:
a) determining whether one or more genetic polymorphisms in a population of plants is associated with the locus for a polypeptide selected from the group consisting of the polypeptides depicted in FIGS. 1-16, a polypeptide having an amino acid sequence of SEQ ID NO: 692, and functional homologs thereof; and
b) measuring the correlation between variation in said trait in plants of said population and the presence of said one or more genetic polymorphisms in plants of said population, thereby identifying whether or not said one or more genetic polymorphisms are associated with variation in said trait.

31. A method of making a plant line, said method comprising:
a) determining whether one or more genetic polymorphisms in a population of plants is associated with the locus for a polypeptide selected from the group consisting of the polypeptides depicted in FIGS. 1-16, a polypeptide having an amino acid sequence of SEQ ID NO: 692, and functional homologs thereof;
b) identifying one or more plants in said population in which the presence of at least one allele at said one or more genetic polymorphisms is associated with variation in a salinity and/or oxidative stress tolerance trait;
c) crossing each said one or more identified plants with itself or a different plant to produce seed;
d) crossing at least one progeny plant grown from said seed with itself or a different plant; and
e) repeating steps c) and d) for an additional 0-5 generations to make said plant line, wherein said at least one allele is present in said plant line.

32. The method of claim 30 or 31, wherein said trait is the level of salinity and/or oxidative stress tolerance.

33. The method of claim 30 or 31, wherein said population is a population of switchgrass, sorghum, sugar cane, or miscanthus plants.
